(19) United States
(12) Patent Application Publication
(10) Pub. No.: US 2025/0243488 A1
(43) Pub. Date: Jul. 31, 2025

(54) METHODS OF MODULATING PROGRANULIN EXPRESSION USING ANTISENSE OLIGONUCLEOTIDES TARGETING REGULATORY RNAS

(71) Applicant: Camp4 Therapeutics Corporation, Cambridge, MA (US)

(72) Inventors: Yeliz Yuva-Aydemir, Grafton, MA (US); Alfica Sehgal, Belmont, MA (US); Yuichi Nishi, Ayer, MA (US); Ali Al Abdullatif, Somerville, MA (US); Gokul Ramaswami, Somerville, MA (US); Justin Andrew Caravella, Cambridge, MA (US); Rutuja Sudhakar Pai, Charlestown, MA (US)

(21) Appl. No.: 18/973,877

(22) Filed: Dec. 9, 2024

Related U.S. Application Data
(63) Continuation of application No. PCT/US2023/068254, filed on Jun. 9, 2023.
(60) Provisional application No. 63/381,910, filed on Nov. 1, 2022.
(60) Provisional application No. 63/369,907, filed on Jul. 29, 2022.
(60) Provisional application No. 63/351,263, filed on Jun. 10, 2022.

(51) Int. Cl. C12N 15/113; A61K 38/17; A61P 5/00

(52) U.S. Cl. CPC C12N 15/113; A61K 38/1709; A61P 5/00; C12N 2310/113; C12N 2310/3341

(57) ABSTRACT

Described herein are methods of modulating GRN gene transcription using antisense oligonucleotides (ASOs) targeting GRN regulatory RNAs, such as promoter-associated RNAs and enhancer RNAs. These methods are useful for modulating the levels of GRN gene products, for example, increasing expression of progranulin (PGRN), to thereby treat diseases and disorders in a subject.

### CROSS REFERENCE TO RELATED APPLICATIONS

[0001] This application is a continuation of International Application No. PCT/US2023/068254, filed Jun. 9, 2023, which claims the benefit of U.S. Provisional Application No. 63/351,263, filed Jun. 10, 2022, U.S. Provisional Application No. 63/369,907, filed Jul. 29, 2022, and U.S. Provisional Application No. 63/381,910, filed Nov. 1, 2022, each of which are hereby incorporated in their entirety by reference.

### SEQUENCE LISTING

[0002] The instant application contains a Sequence Listing which has been submitted electronically in XML format and is hereby incorporated by reference in its entirety. Said XML file, created on Aug. 16, 2023, is named CTC-027WO_SL.xml, and is 11,597,640 bytes in size.

### FIELD OF THE INVENTION

[0003] The invention relates to methods of upregulating or downregulating GRN gene transcription using antisense oligonucleotides (ASOs) targeting GRN regulatory RNAs, such as promoter-associated RNAs and enhancer RNAs.

### BACKGROUND

[0004] Transcription factors bind specific sequences in promoter and enhancer DNA elements to regulate gene transcription. It was recently reported that active promoters and enhancer elements are themselves transcribed, generating noncoding regulatory RNAs (regRNAs) such as promoter-associated RNAs (paRNAs) and enhancer RNAs (eRNAs) (see Sartorelli and Lauberth, Nat. Struct. Mol. Biol. (2020) 27:521-28). Unlike coding RNAs, regRNAs are transcribed bi-directionally. Various models have been proposed for the functions of regRNAs, including nucleosome remodeling (see Mousavi et al., Mol. Cell (2013) 51(5):606-17), modulation of enhancer-promoter looping (see Lai et al., Nature (2013) 494(7438):497-501), and direct interaction with transcription regulators (see Sigova et al., Science (2015) 350:978-81).

[0005] Progranulin (PGRN) is encoded by the human GRN gene and is the precursor of granulin peptides. PGRN is a highly conserved secreted protein that is expressed in multiple cell types, including the central nervous system (CNS) and peripheral tissues. There is growing evidence that PGRN and its proteolytic granulin peptide products are involved in lysosomal function and have trophic and neuroprotective effects.

[0006] Deficiencies of PGRN and mutations in GRN may lead to a variety of neurological diseases and disorders, including frontotemporal dementia. Frontotemporal dementia (FTD) is a progressive neurodegenerative disease where patients progress rapidly to severe dementia and death. Approximately 40% of patients with FTD have familial FTD, with about 30% (10% overall) having a heterozygous GRN mutation resulting in haploinsufficiency. In general, PGRN protein levels stay constant over a patient's life, with non-prognostic factors for the time of initial onset (typically 55-65 years of age). GRN-frontotemporal dementia (GRN-FTD, also known as FTD-GRN) disease onset for FTD patients is subtle; behavioral and language symptoms begin a few years before diagnosis. Within 3-4 years of diagnosis patients have progressed to late-stage dementia, requiring full caregiver support. Life expectancy after the diagnosis of GRN-FTD is typically about 7 years. However, only symptomatic therapies for FTD exist today and there are no available disease-reversing or disease-modifying agents.

[0007] Gene expression has been generally known as an undruggable biological process. Despite on-going efforts into understanding the biology of gene transcription and regRNAs, clinically suitable methods of modulating gene expression are limited. There remains a need for new and useful methods for treating diseases associated with aberrant (e.g., reduced) expression of PGRN, such as FTD.

### SUMMARY

[0008] In one aspect, provided herein are antisense oligonucleotides (ASO) complementary to at least 5 contiguous nucleotides of a regulatory RNA of progranulin (pGRN), wherein the regulatory RNA has a nucleotide sequence selected from the group consisting of SEQ ID NOs: 1-6.

[0009] In some embodiments, the ASO is complementary to a sequence in the regRNA that is no more than 200 nucleotides from the 3′ end of the regRNA.

[0010] In some embodiments, the ASO is complementary to a sequence in the regRNA that is no more than 200 nucleotides from the 5′ end of the regRNA.

[0011] In some embodiments, the ASO comprises a nucleotide sequence selected from Table 17, 18, or 19.

[0012] In some embodiments, the ASO comprises a nucleotide sequence of any one of SEQ ID NOs: 1369-4738

[0013] In some embodiments, the regulatory RNA has a nucleotide sequence of SEQ ID NO: 1, and the ASO comprises a nucleotide sequence selected from the group consisting of SEQ ID NOs: 10-268, 691, 991-1368, or 4743-4915.

[0014] In some embodiments, the regulatory RNA has a nucleotide sequence of SEQ ID NO: 2, and the ASO comprises the nucleotide sequence of SEQ ID NO: 269-279.

[0015] In some embodiments, the regulatory RNA has a nucleotide sequence of SEQ ID NO: 3, and the ASO comprises the nucleotide sequence of SEQ ID NO: 280-291 or 336-359.

[0016] In some embodiments, the regulatory RNA has a nucleotide sequence of SEQ ID NO: 4, and the ASO comprises the nucleotide sequence of SEQ ID NO: 292-313 or 360-380.

[0017] In some embodiments, the regulatory RNA has a nucleotide sequence of SEQ ID NO: 5, and the ASO comprises the nucleotide sequence of SEQ ID NO: 314-335 or 381-416.

[0018] In some embodiments, the regulatory RNA has a nucleotide sequence of SEQ ID NO: 6, and the ASO comprises the nucleotide sequence of SEQ ID NO: 417-442.

[0019] In some embodiments, the ASO is no more than 50, 40, 30, 25, or 20 nucleotides in length.

[0020] In some embodiments, the ASO comprises a RNA polynucleotide comprising one or more chemical modifications.

[0021] In some embodiments, each nucleotide in the ASO comprises ribonucleotides with one or more chemical modifications

[0022] In some embodiments, at least 3, 4, or 5 nucleotides at the 5′ end and at least 3, 4, or 5 nucleotides at the 3′ end of the ASO comprise ribonucleotides with one or more chemical modifications.

[0023] In some embodiments, the one or more chemical modifications comprise 2′-O-methoxyethyl, 5-methyl on cytidine, locked nucleic acid (LNA), and phosphorothioate internucleotide bond.

[0024] In some embodiments, the ASO does not comprise 10 or more contiguous nucleotides of unmodified DNA.

[0025] In some embodiments, the ASO does not comprise a deoxyribonucleotide.

[0026] In some embodiments, the ASO does not comprise an unmodified ribonucleotide.

[0027] In some embodiments, each ribonucleotide of the ASO is modified by 2′-O-methoxyethyl.

[0028] In some embodiments, the length of the ASO is 3×n+10 nucleotides (n is an integer of 4 or greater), wherein the nucleotides at positions 3×m are ribonucleotides modified by LNA (m is an integer from 1 to n) and the nucleotides at the remaining positions are ribonucleotides modified by 2′-O-methoxyethyl.

[0029] In some embodiments, the length of the ASO is 2×n+4 nucleotides (n is an integer of 8 or greater), wherein the nucleotides at positions 2×m are ribonucleotides modified by LNA (m is an integer from 1 to n) and the nucleotides at the remaining positions are ribonucleotides modified by 2′-O-methoxyethyl.

[0030] In some embodiments, the length of the ASO is 3×n+2 nucleotides (n is an integer of 6 or greater), wherein the nucleotides at positions 3×m are ribonucleotides modified by LNA (m is an integer from 1 to n) and the nucleotides at the remaining positions are ribonucleotides modified by 2′-O-methoxyethyl.

[0031] In some embodiments, the length of the ASO is 4×n+4 nucleotides (n is an integer of 4 or greater), wherein the nucleotides at positions 4×m are ribonucleotides modified by LNA (m is an integer from 1 to n) and the nucleotides at the remaining positions are ribonucleotides modified by 2′-O-methoxyethyl.

[0032] In some embodiments, the length of the ASO is 5×n+5 nucleotides (n is an integer of 3 or greater), wherein the nucleotides at positions 5×m are ribonucleotides modified by LNA (m is an integer from 1 to n) and the nucleotides at the remaining positions are ribonucleotides modified by 2′-O-methoxyethyl.

[0033] In some embodiments, the length of the ASO is 2×n+8 nucleotides (n is an integer of 8 or greater), wherein the nucleotides at positions 2×m are ribonucleotides modified by LNA (m is an integer from 1 to n) and the nucleotides at positions 2×m+1 are ribonucleotides modified by 2′-O-methoxyethyl.

[0034] In some embodiments, the length of the ASO is 2×n+8 nucleotides (n is an integer of 8 or greater), wherein the nucleotides at positions 2×m+1 are ribonucleotides modified by LNA (m is an integer from 1 to n) and the nucleotides at positions 2×m are ribonucleotides modified by 2′-O-methoxyethyl.

[0035] In some embodiments, the ASO comprises at least one phosphodiester bond.

[0036] In some embodiments, the ASO comprises 10 or more contiguous nucleotides of unmodified DNA flanked by at least 3 nucleotides of modified ribonucleotides at each of the 5′ end and the 3′ end.

[0037] In some embodiments, each cytidine in the ASO is modified by 5-methyl.

[0038] In some embodiments, the ASO comprises 2 or more contiguous nucleotides of unmodified DNA flanked by at least 3 nucleotides of modified ribonucleotides at each of the 5′ end and the 3′ end.

[0039] In some embodiments, the regRNA is an eRNA.

[0040] In some embodiments, the regRNA is a paRNA.

[0041] In one aspect, provided herein are pharmaceutical compositions comprising the ASO disclosed herein and a pharmaceutically acceptable carrier.

[0042] In one aspect, provided herein are methods of increasing transcription of pGRN in a human cell, the method comprising contacting the cell with the ASO disclosed herein or the pharmaceutical composition disclosed herein.

[0043] In some embodiments, the cell is a neuron.

[0044] In some embodiments, the ASO increases the amount of the regulatory RNA in the cell.

[0045] In some embodiments, the ASO increases the stability of the regulatory RNA in the cell.

[0046] In some embodiments, the ASO increases the amount of pGRN mRNA in the cell.

[0047] In some embodiments, the ASO increases the amount of pGRN protein in the cell.

[0048] In one aspect, provided herein are methods of treating frontotemporal dementia (FTD), the method comprising administering to a subject in need thereof an effective amount of the ASO disclosed herein or the pharmaceutical composition disclosed herein.

[0049] In some embodiments, the ASO increases the amount of the regulatory RNA in a cell of the subject.

[0050] In some embodiments, the ASO increases the stability of the regulatory RNA in a cell of the subject.

[0051] In some embodiments, the ASO increases the amount of pGRN mRNA in the cell.

[0052] In some embodiments, the ASO increases the amount of pGRN protein in the cell.

[0053] In some embodiments, the cell is a neuron.

### BRIEF DESCRIPTION OF THE DRAWINGS

[0054] FIG. 1A shows an illustrative schematic of eRNA, paRNA, mRNA, and natural antisense transcript (NAT) of a gene on a chromosome. The eRNA, paRNA, and NAT are all non-coding RNAs. The eRNA is transcribed bidirectionally from an enhancer of the gene. The paRNA is transcribed from the promoter of the gene, same as the mRNA, but in the antisense direction. The NAT is transcribed from a downstream promoter of its own in the antisense direction, such that the transcript overlaps at least partially with the mRNA. Generally, eRNAs and paRNAs upregulate gene expression whereas NATs downregulates gene expression. FIG. 1B shows an illustrative schematic of the interaction of regRNA with enhancer and promoter regions to recruit transcription factors and regulators that modulate gene expression.

[0055] FIGS. 2A and 2B shows that human GRN (hGRN) mRNA (FIG. 2A) and hGRN paRNA (FIG. 2B) was detected in human induced pluripotent stem cell (iPSC)-derived neurons and induced microglia-like (iMGL) cells following exposure 1 μM or 3 μM vorinostat or to DMSO alone (vehicle control), as determined using qPCR.

[0056] FIG. 3 shows that hGRN paRNA was detected in human cortex tissue from three donors (#1, #2 and #3), as determined using qPCR.

[0057] FIG. 4 shows the relative hGRN mRNA levels as determined using qPCR in human SK-N-AS cells after treatment with the indicated concentration of the indicated ASO.

[0058] FIG. 5A shows the relative hGRN mRNA levels in SK-N-AS cells after treatment with the indicated concentration of the indicated ASO, as determined using qPCR. FIG. 5B shows the relative hGRN mRNA levels in SK-N-AS cells after treatment with the indicated concentration of the indicated ASO, as determined using qPCR.

[0059] FIG. 6 shows the relative human PGRN (hGRN) protein levels in SK-N-AS cells after treatment with the indicated ASOs, as determined by ELISA.

[0060] FIG. 7A shows the relative hGRN mRNA levels in iMGL cells after treatment with the indicated dose of the indicated ASO, as determined using qPCR. FIG. 7B shows the fold change (FC) in secreted PGRN protein levels in iMGL cells after treatment with the indicated ASOs, as determined using ELISA.

[0061] FIGS. 8A and 8B show the relative hGRN mRNA levels in wild type human iPSC-derived neurons (FIG. 8A) and FTD-GRN patient-derived GRN^{M1L} neurons after treatment with the indicated ASOs at the indicated concentration, as determined using qPCR.

[0062] FIG. 9A shows the assay timeline for the staurosporine rescue assay. FIG. 9B shows the percent cytotoxicity levels in GRN-FTD patient derived neurons after treatment with the indicated ASO, PGRN protein, or BDNF protein, and either DMSO or staurosporine at the indicated concentrations.

[0063] FIG. 10 shows the murine mGrn mRNA and paRNA expression in the indicated mouse brain tissue from a C57/BL6, as determined using qPCR. (RT=reverse transcriptase).

[0064] FIGS. 11A, 11B and 11C show the PGRN protein levels in serum samples (FIG. 11A), cerebrospinal fluid (CSF) samples (FIG. 11B), and brain tissue lysates derived from the cortex or mixed brain regions (FIG. 11C), at the indicated dilutions, as determined using ELISA.

[0065] FIG. 12 shows mouse GRN paRNA expression levels in Neuro2a cells after exposure to 0.3 μM, 1 μM, or 3 μM of vorinostat, or DMSO control, as determined using qPCR with two different primer sets (1F/1R and 3F/3R).

[0066] FIG. 13 shows the relative mGrn mRNA levels in Neuro2a cells after treatment with the indicated ASOs at the indicated concentration or a no transfection control, as determined using qPCR.

[0067] FIG. 14 shows the relative mGrn mRNA levels in Neuro2a cells after treatment with the indicated ASO at the indicated concentration or untreated cells (“no ASO”), as determined using qPCR.

[0068] FIG. 15 shows the relative mGrn mRNA levels in Neuro2a cells after treatment with the indicated ASO in mouse primary neurons at the indicated concentration, as determined using qPCR.

[0069] FIG. 16 shows the relative mGrn mRNA levels in the cortex, hippocampus and striatum mouse brain regions from C57/BL6 mice after in vivo treatment with the indicated ASO or PBS control.

[0070] FIG. 17 provides the sequences and chemical modifications of human GRN ASOs. Medium gray shading indicates MOE; * indicates 5Me-C; dark gray indicates LNA; light gray indicates 2′OMe (2′-O-methyl); black line indicates phosphodiester (PO) bond; white indicates DNA.

[0071] FIG. 18 provides the sequences and chemical modifications of mouse GRN ASOs. Medium gray shading indicates 2′-MOE; light gray indicates O-methyl; * indicates 5Me-C; dark gray indicates LNA; black line indicates phosphodiester bond (PO); white indicates DNA.

[0072] FIG. 19 shows increased PGRN protein secretion and reduced protein secretion of IL-8 and CCL4, as well as reduced gene expression of IL-6, CCL4, and CCL2 in iMGL cells treated with PBS or IFNγ and the indicated ASOs.

[0073] FIG. 20A provides hGRN mRNA levels in hGRNT^{Tg} mice after ICV injection of CO-8178 or aCSF (control), as determined using qPCR. FIG. 20B provides hPGRN protein quantification in hGRNT^{Tg} mice after ICV injection of CO-8178 or aCSF (control), as determined by ELISA. FIG. 20C provides the fold change (FC) in hPGRN protein in CSF of mice post-ICV injection of CO-8178 or aCSF (control). Fold change was calculated by normalizing the levels of hPGRN protein CO-8178 treated samples to the aCSF treated samples.

[0074] FIG. 21A provides hGRN mRNA levels in hGRNT^{Tg} mice brain tissues following ICV injection of the indicated ASOs or aCSF (control), as determined using qPCR. FIG. 21B provides hPGRN protein levels in hGRNT^{Tg} mice brain tissues after ICV injection of the indicated ASOs or aCSF (control), as determined using ELISA.

[0075] FIG. 22A shows mGrn mRNA levels in heterozygous Grn^{tm1.1Far} mice brain tissues after ICV injection of the indicated ASO or aCSF (control), as determined using qPCR. FIG. 22B shows mPgrn protein quantifications heterozygous Grn^{tm1.1Far} mice brain tissues after ICV injection of the indicated ASO or aCSF (control), as determined using ELISA.

[0076] FIGS. 23A, 23B, 23C, and 23D show mGm mRNA levels in Grn^{tm1.1Far} mice brain tissues: cortex (FIG. 23A), hippocampus (FIG. 23B), cerebellum (FIG. 23C), and striatum (FIG. 23D) after ICV injection of the indicated ASOs or aCSF (control), as determined using qPCR.

[0077] FIG. 24 shows mPgrn protein levels in Grn^{tm1.1Far} mice brain tissues (cortex and cerebellum) after ICV injection of the indicated ASOs or aCSF (control), as determined using ELISA.

[0078] FIGS. 25A and 25B show the upregulation of secreted hPGRN protein (FIG. 25A) and intracellular hPGRN protein (FIG. 25B) in SK-NA-S cells after treatment with the indicated ASO, as determined using ELISA.

[0079] FIGS. 26A and 26B show dose dependent upregulation of hGRN mRNA in SK-NA-S cells after treatment with the indicated ASOs at the indicated concentration, as determined using qPCR.

[0080] FIG. 27 shows dose dependent upregulation of hGRN mRNA in human iPSC-derived neuron cells after treatment with the indicated ASO, as determined using qPCR.

[0081] FIG. 28A shows upregulation of GRN mRNA expression in iMGL cells treated with either PBS or IFNγ and the indicated ASOs, as determined using qPCR. FIGS. 28B and 28C show reduced IFNγ-induced chemokine (CCL3 and CCL4) expression in iMGL cells treated with either PBS or IFNγ and the indicated ASOs, as determined using ELISA.

### DETAILED DESCRIPTION

[0082] The present disclosure provides antisense oligonucleotides (ASOs) targeting regulatory RNAs, such as promoter-associated RNAs and enhancer RNAs, and methods using these ASOs to regulate gene expression. These methods are useful for modulating the levels of gene products, for example, modulating expression levels of granulin precursor or progranulin (PGRN, encoded by the GRN gene), to thereby treat diseases associated with aberrant GRN gene expression in a subject, such as, but not limited to, frontotemporal dementia (FTD), frontotemporal lobar degeneration (FTLD), neuroinflammation, myopathy, familial frontotemporal dementia with neuropathologic frontotemporal lobal degeneration associated with accumulation of TDP-43 inclusions (FTLD-TDP), Down syndrome, Huntington's disease, hippocampal sclerosis dementia, spinocerebellar ataxia 3, chronic traumatic encephalopathy, Alzheimer's disease (AD), amyotrophic lateral sclerosis (ALS), Gaucher disease (GD), Parkinson's disease (PD), neuronal ceroid lipofuscinosis (NCL) type11 (CLN11), limbic-predominant age-related TDP-43 encephalopathy (LATE) Gaucher disease, autism, ischemia-reperfusion injury in the brain, a lysosomal storage disease (LSD), rheumatoid arthritis (RA), inflammatory bowel disease (IBD), multiple sclerosis (MS), ischemic heart disease, intervertebral disc ceneration, and acute kidney injury.

[0083] In some embodiments, the ASOs of the disclosure may be used to restore progranulin or granulin expression in cells, such as cells which exhibit progranulin haploinsufficiency, or to enhance the expression of progranulin in cells (e.g., neurons). In some embodiments, the ASOs of the disclosure may be used to restorle or increase the levels of secreted progranulin or granulin in a subject (e.g., a subject having a progranulin haploinsufficiency).

[0084] Various aspects of the multi-specific binding proteins described in the present application are set forth below in sections.

### I. Definitions

[0085] To facilitate an understanding of the present application, a number of terms and phrases are defined below.

[0086] The terms “a” and “an” as used herein mean “one or more” and include the plural unless the context is inappropriate.

[0087] As used herein, the terms “granulin precursor,” or “progranulin,” or “PGRN” or refer to the protein of UniProt Accession No. P28799 (human) when used in reference to a human version of the protein, and to the protein of UniProt Accession No. P28798 (mouse) when used in reference to a mouse version of the protein, and related isoforms and orthologs.

[0088] As used herein, the terms “regulatory RNA” and “regRNA” are used interchangeably to refer to a noncoding RNA transcribed from a regulatory element of a gene (e.g., a protein-coding gene), wherein the gene is not the noncoding RNA itself. Exemplary regulatory elements include but are not limited to promoters, enhancers, and super-enhancers. A noncoding RNA transcribed from a promoter, in the antisense direction, is also called “promoter RNA” or “paRNA.” A noncoding RNA transcribed from an enhancer or super-enhancer, in either the sense direction or the anti-sense direction, is also called “enhancer RNA” or “eRNA.” It is understood that a natural antisense transcript (NAT) complementary with at least a portion of the transcript of the gene is not a regulatory RNA as used herein.

[0089] As used herein, the term “nascent RNA” refers to an RNA that is still being transcribed or has just been transcribed by RNA polymerase and remains tethered to the DNA from which it is transcribed. An RNA that has dissociated from the DNA from which it is transcribed is also called an “untethered RNA.”

[0090] As used herein, the term “antisense oligonucleotide” or “ASO” refers to a single-stranded oligonucleotide having a nucleotide sequence that hybridizes with a target nucleic acid under suitable conditions or a conjugate comprising such single-stranded oligonucleotide. In some embodiments, the disclosure encompasses pharmaceutically acceptable salts of any of the ASOs described herein. Suitable pharmaceutically acceptable salts include, ut are not limited to, sodium, potassium, calcium, and magnesium salts. In some embodiments, the ASOs provided herein are lyophilized and isolated as salts (e.g., sodium salts).

[0091] As used herein, in some embodiments, the stability of a regRNA is reversely correlated with the degradation rate of the regRNA. In some embodiments, where an ASO increases the stability of a regRNA, it reduces the degradation rate of the regRNA. In some embodiments, where an ASO decreases the stability of a regRNA, it increases the degradation rate of the regRNA. In some embodiments, the degradation rate of a regRNA can be measured by blocking synthesis of new regRNA and assessing the half-life of the existing regRNA.

[0092] As used herein, the terms “subject” and “patient” refer to an organism to be treated by the methods and compositions described herein. Such organisms preferably include, but are not limited to, mammals (e.g., rodents, primates, simians, equines, bovines, porcines, canines, felines, and the like), and more preferably include humans.

[0093] As used herein, the term “effective amount” refers to the amount of a compound (e.g., a compound of the present application) sufficient to effect beneficial or desired results. An effective amount can be administered in one or more administrations, applications or dosages and is not intended to be limited to a particular formulation or administration route. As used herein, the term “treating” includes any effect, e.g., lessening, reducing, modulating, ameliorating or eliminating, that results in the improvement of the condition, disease, disorder, and the like, or ameliorating a symptom thereof.

[0094] As used herein, the term “pharmaceutical composition” refers to the combination of an active agent with a carrier, inert or active, making the composition especially suitable for diagnostic or therapeutic use in vivo or ex vivo.

[0095] As used herein, the term “pharmaceutically acceptable carrier” refers to any of the standard pharmaceutical carriers, such as a phosphate buffered saline solution, water, emulsions (e.g., such as an oil/water or water/oil emulsions), and various types of wetting agents. The compositions also can include stabilizers and preservatives. For examples of carriers, stabilizers and adjuvants, see e.g., Martin, Remington's Pharmaceutical Sciences, 15th Ed., Mack Publ. Co., Easton, PA (1975).

[0096] Throughout the description, where compositions are described as having, including, or comprising specific components, or where processes and methods are described as having, including, or comprising specific steps, it is contemplated that, additionally, there are compositions described in the present application that consist essentially of, or consist of, the recited components, and that there are processes and methods according to the present application that consist essentially of, or consist of, the recited processing steps.

[0097] As a general matter, compositions specifying a percentage are by weight unless otherwise specified. Further, if a variable is not accompanied by a definition, then the previous definition of the variable controls.

### II. Antisense Oligonucleotides

[0098] In some embodiments, the antisense oligonucleotide (ASO) disclosed herein hybridize with a regRNA (e.g., a regRNA or a paRNA) transcribed from a regulatory element of the GRN gene (also referred to herein as a “GRN regRNA”). It is understood that both eRNAs and paRNAs are regRNAs modulating (e.g., facilitating or upregulating) gene expression (FIG. 1). In some embodiments, the GRN regRNA is a murine GRN regRNA. In some embodiments, the GRN regRNA is a human GRN regRNA. In certain embodiments, the target GRN regRNA is an eRNA. In certain embodiments, the target GRN regRNA is a paRNA. eRNAs can be identified using methods known in the art, such as Assay for Transposase-Accessible Chromatin using sequencing (ATAC-seq), global run-on sequencing, precision run-on sequencing, cap analysis gene expression, and histone modification analysis (see, e.g., Sartorelli & Lauberth, Nat. Struct. Mol. Biol. (2020) 27:521-28; PCT Application Publication No. WO2013/177248). paRNAs are RNAs transcribed from promoters of target genes in the antisense direction (transcripts in the sense direction are mRNAs of the target genes). They can be identified by similar methods, taking into account of their specific location and orientation. The nucleotide sequences of exemplary regRNAs are provided in Table 1 below. Any of these GRN regRNAs are contemplated as a target GRN regRNA of an ASO disclosed herein.

TABLE 1
Exemplary regRNAs

| regRNA | Nucleotide Sequence |
|---|---|
| Human GRN | CTCCGTTATCTTCCACTAGGTGGCACCCCCCAACTCCGAGTGCCAAGGGGAGAGGA |
| (hGRN) | AATTCCCAAAAGGGGAGCCAACCTAGCTGCAAATGAGCAGGAAAAAGTGGCTGGG |
| paRNA 1 (−) | AGAGGCGGAAGCTAGCTCGTCCCACCCGCAACAAGAGGAAGTAAGGAGGAGCCA |
| strand | GACCAGGTTCAGTCACCACTCCCAAGTCCCTACTACCTTCGAGAAGCCAAGGTCTC |
| SEQ ID NO: 1 | AGGTCTCGTTCCCAGGCCCTCGGAGCTCCCAGCCCAGGGTCGCGCGCCCCTCCGGC |
| | TCCAGGCCGCCGCGGGAACCACCCACCACCACCAGGAGAGGGGAAGAAGCCAGCA |
| | CCTACCGACAGGGGTGGAGCTGGGTCAAGAATGGTGTGGTCCCTGCTTTGGGGGA |
| | ATGCTGGGGAGGTAGAAAGCCCCTTCTAACGGGGCGTCACTGCAATTACTGCTTCC |
| | TCTTTCCCATAAAACTCCCCCTAGTGTATCAGAACCCCCAAGGAGTTTCAGTAAGC |
| | GGTTCTTCTGTTGTCTCCGGCTGAGACTCCAGGGGAACCTCAAGCTCACATGGCCC |
| | TGGCGGGCCCCTGGGCAGGAGCAGGCGAGAGGTCTGCGCGGCCGCTCTCCTACCT |
| | GCGTCCGACTCCGCGGTCCTTGGGCAGCAGCAACCGGGTAGCGCTCAGACTACAG |
| | ACCCCAGCGCGATGACCCGCCTACCTCAGTTTCCATTGGCCAGGGATCAGGGCTAC |
| | CCGCTCCCATTGGCTACTTATCAATATAGAGGTGGGGCCAGCCTGGAATGCTGTGT |
| | TTCTTTTCTACTCAAATCACTCTCCTCCCTGCTTCCTCTCGCCCCACACCCCATTTCT |
| | AGGGATCATGTGATTGGAGAATCATGTGACGTCGGGACAGCCTCAGCAGGGCAGC |
| | TGGTGCTCGTCGCCTTCCTTAACCCATCCTGCAGGCGCCTGGGGGAGTTTGCTAGA |
| | GATGATAGCGCGTGTCTGGGGCATTGACAGTGCGAGGGAGTGTTATGAATTGGGA |
| | ATATTTGTGCTCGCCTTTCTATCCTTTTGTTTGTTTGTTCTGAGACGGAGTCTCACTC |
| | TGTCGCCAGGCTGGAGTGCAGTGGCACGATCTCGGCTCACTGCAACCTCTGCCTCC |
| | CGGGTTCAAGCGATTCTCCTGCCTCAGCCTCCCGAGTAGCTGGGACTACAGGCGCG |
| | CACCACCACGCCCAGCTAATTTTTGTATTTTTAGTAGAGACGGGGTTTCACCATGTT |
| | GGCCAGGATGGTCTCGATTTCTTGACCTCGTGATCCGCCCACCTCGGCCTCCCAAA |
| | GTGCTAAGATTACAGGCATGAGCCACCGCGCCCGGACTTGTGTGTTTGTTTTAGAG |
| | ACAGGGTCTCGCTCAGTCGCCCAAGCTGATCATAGCTCACTGCGGCCTGCAACTCC |
| | TGCTCCCAAAGCGATTCTCCTACCGCAGCCCCCCAAGGCGCTGGGATTACAAATGT |
| | GAGCTACTGAGCTGGCTCGCTCCTATCCTATCCTGCCCTGTCTTGTCCTGTCCTGTC |
| | CTGCCCTATTCTGCCCTATTCTCCAAACTCGGTTGACATGCTAGGCAGGCCCCAGA |
| | GTGAGTTGAAGGATGGTTTCCAGGACAAAGATAAACAGCCCCAAAGCCCTTTCCTC |
| | AAGGTGCTCAGCAGGACAGGGAGCAGGGATTGGTGGGAGACAGTCTCAGGCTGAA |
| | TCTAATTTAAGATACAAGGTTGTGCGCCAGTTGCCAGGTGTAGGGAGAGGAAGTA |
| | GATTGTCTCCAGGTGGGGAAGAAGAGATTTCATTCCACCTTAGGAGCATCTCCTTG |
| | AGCTGAGTCTGGGAAGATTTTAACTGGCAGGTGGAGGAGGAGGTGTTGGGAAGAG |
| | CCCTGGGAAACCAGATGGGAAGGGCAGGCTTGGCAGGGATTGAATGCCATGTTCA |
| | ATGCCAGTGGGCTTCAGGAGCTGCTGGGTGCCTGGCACGGGCTGGGCTGTGGTGGG |
| | GGCTGTCGAAAGAGAAGTGGCTTCCTAGTCTCCAGATCGGCCCTGCCTTCGAGGAA |
| | TTGATATGGGAGGGTGAGGAGAGAAAATGTACCACAGAACAGATTAGCCAGTGAC |
| | AAGAGTCAGCCTGCTTGGTGCCAAAGGGCCTGGGCCAGGCAGAGATGGATGATGG |
| | GAGATGGGCCAGGAGAGAGGAGAGGCCCAGGGAAAGCCTGATACTGGGCCGTGG |
| | AGGAACGGCAGTGTCTGCACAGGGGATGGAGACTGCTGCAGCCTGAGCAAGGAAC |
| | TGGAGCTGAGGATGAGGCAGGGGCAGGGGGATGGCTAACCAAGCTCGAGGCAGC |
| | AGAAGTCGGAGGAGGGAAAGGGTGCCAACCGAGCTGTGGAGTCGTGTGGCAGGG |
| | GTTCTAAGCCTGGAGCTAGAGCAGACCCAGACAGCGGATAAGACACCTGGCCTGC |
| | TGAGGACCTAGTACTAGTCTGTGCCCTGGTGACACATTTGTGCTTATTTTCCTTCCT |
| | GTGTATCTTGAGACTAGGGAGTATAGTTTATGCTTCTATTGAAACACACACACACA |
| | TGAAACTTTCATGAAATGTTAGGTGAATCGATCAATAACCTACTAATTACAACCAC |
| | CCAGAACCAGAAAAAAATACAGGTAGAAGAAAAAAAACCTAAACAGACTGAAAC |
| | AAATATCACAAAGTCTAATCGTCAAAGCCGTGATTCTTGAGCAGCGGCAATTTTGC |
| | CGGCCAGGGACATTTAGGAGTGTCTGGAGACAATCTGGGTTGTCACAACTCAGGGT |
| | GGAGGGACACTGGCATCTGGTAGGTAAGGGCCAGCAATCCCACTAAACATCACAC |
| | GACACACAGAACAATCCCCCACAACAAAGAAGTATCCTGCCCAAAAGGTCAATAG |
| | TGCTGAGACTCAACAACCTACTTCACAAATGTTTCTCTCTCTCTCTCTCGCTCTTTTT |
| | TTTTTTTTTTTTAACATCAGAAGGGTAAGGTGCCACGATAACGAGGTCTGTAATTCC |
| | CTACTCAGGAGGCCGAGGCAGGAGAATCGCTTGAACCCGGGATGCAGAGGTTGCA |
| | GTAAACCGAGATCGTGCCACTGCATTCCAGCCTGGACAACAGAGCGAGACTCCATC |
| | CACCCCCGCCAACACAAAAAAATTAAAGTGTACAACTCAATGGTTTTTAGTGTCTT |
| | AAGAGAGTTATGCAGCATCATTACAATCAGTTTAAGACCATTTTTATCACCACAGA |
| | AGGCAGCCTTATGTCCTTTAGCAGTCACCCTCCCTAACCCTAGGCA |
| hGRN eRNA | CGGAAGGCGGAGGTTGCGGTGAGCCGAGACTGCGCCATTGCACTCCAGCCTGGGC |
| 1 (+) strand | AACAAGAGCGAAACTCCGTCTGAAAAAGAAATAGATTACCCCGTTTTACAGAAAG |
| SEQ ID NO: 2 | TGAAACTGAGGCTCGACGTGAAGAGCCGGAGATTCGAACCGGCCGGGTGCTTTTCC |
| | CAGGGCTCCACACTGCCTCCCCGGGAGACAGGAAGGCTTAAGTCCAGCGCTGCCCT |
| | CTCCGATCCCGCTTGTCAGGGAGACACTTTATTTCCCGGGGCAGCCCCGTACCCCA |
| | GGCCCCACCACCCACTTCGCGTTTAGAACTTCTGTGCTATCTTGCTTATTTGTCCTA |
| | ACAGAGAAACCAGCACGCGCGGGCGGTGGCGGAGGGGGGCGGGCGGGCGGGTGG |
| | AGGCGGGGGGGGGGGGGCGGGGAGATGGGTACTCCTAGCCTGCGCCTTTAAGAAG |
| | GGTAGGCCTCGACTTTGACGTCTCTGCCTTCCCCGCCCTTCAGGCCCCCACTGGTCG |
| | CGTCCGGCGCTGGAGGAGCCCAGTCAGCCGGCGCCTGCCGGGTTAGCACGTGGAC |
| | TCCGAGGGGCCAACTATCAGCTTTCCCTGACAAAATGCCTTTGAGCTCCCCCACAG |
| | CTCTGAAACTCCAGCTTGGGAGCAGGGAGAGTGCAATCTGTGACCTGTAAAGGGG |
| | CGCTGGGCAAAAGGGCCCGAGAGAAGGCGTCCTTTCCATTCCCTTCCCATCTCAAG |
| | CTGAGTTCAGAAATGACACGAAATAATTTAATCAACTATCAGTCAAGGTCGGGCTC |
| | ACGCCTGTAATCCCAGCAGTTTGGGAGGCCGAGGTGGGCGGATCACCTGAGGACA |
| | GGAGTTCGAGACCAGCCTGACCAACATGACGAAGCCCCGTCTCTACTAAAAATAC |
| | AAAAATTAGCCAGCGGTGGTGGTGCGCACCTGTAGTCTCAGCTACTTGGGAGGCTG |
| | AGGCCAGAGAATCGCTTGAGCCCGCGAGGTCGAGGCTGCAGTGAGCCGAGATCAC |
| | ACCACTG |
| hGRN eRNA | CAGTGGTGTGATCTCGGCTCACTGCAGCCTCGACCTCGCGGGCTCAAGCGATTCTC |
| 2 (−) strand | TGGCCTCAGCCTCCCAAGTAGCTGAGACTACAGGTGCGCACCACCACCGCTGGCTA |
| SEQ ID NO: 3 | ATTTTTGTATTTTTAGTAGAGACGGGGCTTCGTCATGTTGGTCAGGCTGGTCTCGAA |
| | CTCCTGTCCTCAGGTGATCCGCCCACCTCGGCCTCCCAAACTGCTGGGATTACAGG |
| | CGTGAGCCCGACCTTGACTGATAGTTGATTAAATTATTTCGTGTCATTTCTGAACTC |
| | AGCTTGAGATGGGAAGGGAATGGAAAGGACGCCTTCTCTCGGGCCCTTTTGCCCAG |
| | CGCCCCTTTACAGGTCACAGATTGCACTCTCCCTGCTCCCAAGCTGGAGTTTCAGA |
| | GCTGTGGGGGAGCTCAAAGGCATTTTGTCAGGGAAAGCTGATAGTTGGCCCCTCGG |
| | AGTCCACGTGCTAACCCGGCAGGCGCCGGCTGACTGGGCTCCTCCAGCGCCGGACG |
| | CGACCAGTGGGGGCCTGAAGGGCGGGGAAGGCAGAGACGTCAAAGTCGAGGCCT |
| | ACCCTTCTTAAAGGCGCAGGCTAGGAGTACCCATCTCCCCGCCCGCCCCCCCCCGC |
| | CTCCACCCGCCCGCCCGCCCCCCTCCGCCACCGCCCGCGCGTGCTGGTTTCTCTGTT |
| | AGGACAAATAAGCAAGATAGCACAGAAGTTCTAAACGCGAAGTGGGTGGTGGGGC |
| | CTGGGGTACGGGGCTGCCCCGGGAAATAAAGTGTCTCCCTGACAAGCGGGATCGG |
| | AGAGGGCAGCGCTGGACTTAAGCCTTCCTGTCTCCCGGGGAGGCAGTGTGGAGCCC |
| | TGGGAAAAGCACCCGGCCGGTTCGAATCTCCGGCTCTTCACGTCGAGCCTCAGTTT |
| | CACTTTCTGTAAAACGGGGTAATCTATTTCTTTTTCAGACGGAGTTTCGCTCTTGTT |
| | GCCCAGGCTGGAGTGCAATGGCGCAGTCTCGGCTCACCGCAACCTCCGCCTTCCG |
| hGRN eRNA | ATATATATATATATATATAAAACAGCTGGGATCAGCCCAATTTGGGGAAGTCCTCC |
| 3 (+) strand | CTGTCTCCCCCTGCCTCTGTGGCCTGAGAAGGTGGGCTGGAAGTGTCTAGGCACCC |
| SEQ ID NO: 4 | AAGGCTTTATTGGGGGGCCCTGGGTGTGGTCTGAGGAGGTGGGCCCCTAGAGGGA |
| | GAGGGTCCTGGCTAAGACTTTCCAGCATGTCCCCCAGCCTGGGTCCCAGAGCTCTG |
| | CTGGGACAGCGTGGATTAATATGGAAGGTAGTTTTAGCCATAGCTATGAAAATTCT |
| | AAACGCCAAACCCTTGATCCAGCCAGGCCACTTCTAAGCGTTTCTCTAGTCATCTG |
| | CTCATACAAGTGTGAAATGATGGTACCAGCTTGGCCTTCTTCATTGCAGCCTTCTTT |
| | GTAACAGCAGAACATCCCGTGAAAGGGAACTGTTAAGTACGTGACCCTATCTCCAT |
| | GTGACAAATCCACACAGCCTTGAAAGGGCGGCATTCCCTGACCTATCCAGGTGGGG |
| | TGGGGGGTGAGGGCTGCAGATCTCTATATCATTATGTAAAACAATCTCAAAGACAG |
| | AGTTAAATTAAACAGCAGGTGCTGAGAGCGTGCTGGACACTCGTTCCAAACAGCA |
| | GCGTTACTGCCCCCTAGAGGACATTTTTTGAAATTTATGCGGCCACTGTCATTTCTG |
| | GTTGTCACAAGACTGGGGCTTCTGGCATTTGATAGATGGCAGGTCAGGGAAGCTAA |
| | ATGCCCTGTAAGGTGTAGGACAGTCTGACACAATAGGGAATTTCCAACAACAAGA |
| | ACACATCTCTCAATTTCCTTCTGTCTTTCTGGGCAATTACATACATGAGGAAATGTT |
| | TGCAATTCTCAGACCTGGAAAATGGTTCTGTTTTACCCATATACCCACACCTTTTTT |
| | TTTTTTTTTAGACAGGGTCTCTCACTCTGTCGCTGGTTGGAGTGCAGTAGCACGATC |
| | ACAGCTCACTACAGCCTCGACCTCCCCGGCTCAAGCGATCCTCCCACCTCAGCCTC |
| | CCGAGTAGCACACTCCTCTGCCTGACTAATTCGTTTGTATTTGTTGTAGAGACAGGG |
| | TTTCGCTATGCTGCCCAGGTTGTAACCATACTTCTTTTGAATACTTATATTCTGCTAT |
| | GCATTGAGTTTTCCAGGAATAAAACCACTCTGCAGTTGTATGGAAAATTGGGTTTT |
| | GTCTTCAAGAACTTTACCGAAGGTCATTTGCCATTTCATTTTTTGTTTGGTTTGTTTT |
| | GTTTTTTTGAGATG |
| hGRN eRNA | CATCTCAAAAAAACAAAACAAACCAAACAAAAAATGAAATGGCAAATGACCTTCG |
| 4 (−) strand | GTAAAGTTCTTGAAGACAAAACCCAATTTTCCATACAACTGCAGAGTGGTTTTATT |
| SEQ ID NO: 5 | CCTGGAAAACTCAATGCATAGCAGAATATAAGTATTCAAAAGAAGTATGGTTACA |
| | ACCTGGGCAGCATAGCGAAACCCTGTCTCTACAACAAATACAAACGAATTAGTCA |
| | GGCAGAGGAGTGTGCTACTCGGGAGGCTGAGGTGGGAGGATCGCTTGAGCCGGGG |
| | AGGTCGAGGCTGTAGTGAGCTGTGATCGTGCTACTGCACTCCAACCAGCGACAGAG |
| | TGAGAGACCCTGTCTAAAAAAAAAAAAAAAGGTGTGGGTATATGGGTAAAACAGA |
| | ACCATTTTCCAGGTCTGAGAATTGCAAACATTTCCTCATGTATGTAATTGCCCAGAA |
| | AGACAGAAGGAAATTGAGAGATGTGTTCTTGTTGTTGGAAATTCCCTATTGTGTCA |
| | GACTGTCCTACACCTTACAGGGCATTTAGCTTCCCTGACCTGCCATCTATCAAATGC |
| | CAGAAGCCCCAGTCTTGTGACAACCAGAAATGACAGTGGCCGCATAAATTTCAAA |
| | AAATGTCCTCTAGGGGGCAGTAACGCTGCTGTTTGGAACGAGTGTCCAGCACGCTC |
| | TCAGCACCTGCTGTTTAATTTAACTCTGTCTTTGAGATTGTTTTACATAATGATATA |
| | GAGATCTGCAGCCCTCACCCCCCACCCCACCTGGATAGGTCAGGGAATGCCGCCCT |
| | TTCAAGGCTGTGTGGATTTGTCACATGGAGATAGGGTCACGTACTTAACAGTTCCC |
| | TTTCACGGGATGTTCTGCTGTTACAAAGAAGGCTGCAATGAAGAAGGCCAAGCTGG |
| | TACCATCATTTCACACTTGTATGAGCAGATGACTAGAGAAACGCTTAGAAGTGGCC |
| | TGGCTGGATCAAGGGTTTGGCGTTTAGAATTTTCATAGCTATGGCTAAAACTACCTT |
| | CCATATTAATCCACGCTGTCCCAGCAGAGCTCTGGGACCCAGGCTGGGGGACATGC |
| | TGGAAAGTCTTAGCCAGGACCCTCTCCCTCTAGGGGCCCACCTCCTCAGACCACAC |
| | CCAGGGCCCCCCAATAAAGCCTTGGGTGCCTAGACACTTCCAGCCCACCTTCTCAG |
| | GCCACAGAGGCAGGGGGAGACAGGGAGGACTTCCCCAAATTGGGCTGATCCCAGC |
| | TGTTTTATATATATATATATATAT |
| hGRN eRNA | GGGCCCCACCCCTGTATCTGCACCCTGCCTCTGGTACCTGTGTGCGCAGGCAGCTT |
| 5 (−) strand | AGTGAGGAGGTCCGTGGTAGCGTTCTCCTTGGAGAGGCACTTACTCTGGATCAGGT |
| SEQ ID NO: 6 | CACACACAGTGTCTTGGGGGCAGCAGTGCAGGTGATCGGAGCAGCAGGTGGCCTG |
| | AGTGGGGACAGGGGTGGGTCTTTGTCACTTCCAGGCTCAGTAGCACACAGGGAGC |
| | AGCCAGGCTGATGGCTGGCACTGCCCCAATCCCCCACTAGGGGGTAGCATGAACCC |
| | TGCATCAGCCAGGCTCCCAGCAAGCAGCCAGCCAGCCCCATGCCACAGAGCCCCT |
| | GTAAGGTGCGTGTCAGGGCCAGGTGGCTGGGGGCACACAGCCAAGCTGGCTCCAG |
| | CCCCTCACTCACGTTGGGCATTGGGCAGCAGCCATACTTCCCACTGGGCAGCTCAC |
| | AGCAGGTAGAACCATCAGGGCACCGGGACCGTGCGTCCGGACACATGACCGAGCT |
| | GGACAAGGCCACTGGAAGAGGAGCAAACGTGAGGGGCAGCCAGGATGGAGGAAA |
| | CTTTTTCCTACACTTGGAGTCAATGAGGCCCCGCCCCAGCCCCTGGC |
| Mouse GRN | TTTAGCGATTCCACATTGTGTACATATATCAAAATATCATGTTGTACACCATAAATA |
| (mGRN) | CAGTTTTTTTTTAAGTATCCCACCGACTATTTTTAGTTTTTCTTTTTTAATCCAATGA |
| paRNA 1 (−) | CATAAGCACAGTTTCCTAAAATGGGAACTGACCCTCTCCTACAAAACATTTCATTA |
| strand | TGGTTATATCTTCATGACATGAAAACAACTAGTTGAAAAGTGATGACTTTTTTAGTC |
| SEQ ID NO: 7 | TATTACCTGACTGTTCAGTAAGAATTGGTTTGACTACTTTTTTCACCCCACATTGAA |
| | TTTGGTTCACTAGTTTAGTGGTCCCTCCCCCATGTCATCCCCACCCAGTATGTGTAT |
| | TATGTTGTATTTTGGGGAAGATACAAAGAGAAAAATTGCTTTGCTGTTAATTGAAT |
| | TTGGGCAAGCTACTTAATCTCTGCCTTCTCACTTCCTGCTATGAAATAGAGCTGATT |
| | ATAGAAAGATGGCTGTCTCATGCGGCTAAGAGAGTATAGCCATCTCATGGGTTAAA |
| | TGAGGTAACATGTAAAGCACCTGGCACAAAACCAGGACCTAAATAAACGTGTTTTT |
| | CCTAGCTCTGTGGCCACACTTACCTTTTTGGTTCCTCCTTTCTCTGCCCTCTCTGCCA |
| | TGAGACCTTTGCATGTTCTGTTCTCACTACCTGAAGAGCTCTTCCTTTCATCTTTGCC |
| | TTTTTCTGGCTACCAGTTACCCTTTCAGCCTTTAGATTGCTCAAGCTTGTTTCCTCAG |
| | GTCCAGTCCTAGACCTCTAGGCTTATAACTGGGATACCAGCCTTCAGAGGAGTTTG |
| | TGGTTTACTGGCTTATAGTAATGTAATGTGATGCTTCATCTCACTCTGCCTCCCCAA |
| | CTAGAAAGTCAGCTCCTTCAGGGGGAAGGCTGATTTTACTCACCACCACCTTCCCA |
| | GCACCCAGTGCTGTTTTTGTTGAAACAGTAAAGGATATGCGAATGCTATGGGAGGA |
| | GTAAACCAGTTTTTGAGTTTTTTGCTTGCTATACCAGCCTTAGTTGTGAGATGGAGC |
| | CCCTTGGTCAAAACAAATCACCACCTGCACTCTGGTCTTCTCACTTAACAGGGGAG |
| | AATTGCCACAGTTGTCTTCTGTGGTCCCGGGCAACTCTGTTCTTTGCCTCTTTGTTTC |
| | CATAAAGATGAAGCCCATCCAGAAAAGGTACTCATGCTGGCTGGGAGAGGTGGCA |
| | TGGGGAAGGGGATGGACAGAGCAATTTGGAAGATCAGAGAGGCCTCTGCCCCTAC |
| | GAAGGGCCATGCTTGCCACCAGTCTTCCTGCTGTGTGGTGCTCCCATCGCACAGGC |
| | TGCTTCTGGAGATGCTCGGGTTGTTCAGGCCCTGTGGCTTTTGGCAAGGCAGGAGC |
| | ATCTGTGCTTCTGCTGACATAAAAGAGGGTAATAAAAGTGACACAGGAAAGCGGT |
| | GTTGTGAGGCTTTAGTGATGGTGGAGCAGTGTTGCTGAAGTCCCTCAGGGAGTTTG |
| | GATTTGATTGCAGTGAGTCTGGCTACATCTGAAGCCTATAATAGTTTACAGTACAA |
| | GATGCTATGTATAAGATGTCAAACATTTGCTTGGTAGAATGCTATGATTGTCAGGA |
| | GTTTACTTTTGCACTGAAAATAGTCTTGTTGGTTTGGTGTAAGTAGAGTCACATTGC |
| | AGCACACACACAGGCATTCATGCTTTTATGTTTGTTAATTGTAAGGAAATGTTTTCT |
| | CAAGGCAAGAGTCAAAGGTTAGCAGAGTGCCAAAGACCTTCTCAAAGAGGAAAGT |
| | CTCATTTTAGAAACTTCATTTTGTACGCCAAAACTTGCCTTTCAGTAGTCTCATGTA |
| | ATGTTTTTGCTGACATGAGTTGAAAAGTGCATTCTGTTGTAAAGGAGGAAAAAAAC |
| | TGAAGAGGAACCGTAAGCGTGATTATGAAGAAGAGAAAAGAGCAGGAAGAAAGT |
| | AGACATCATCCCAGATTTAAATTTCATATTGTTAAAATCATTTGGTTGCAAGCAGTA |
| | GAAATTTTCTATAACTAACTTAGATAAACAAGGACTTGTTGGACACCTGCTGTCCA |
| | ACATTCACAAAACCTAAAGAAGAAAACTGAACTAGATCTAGTGTGGCTAGGGATT |
| | TCAGGGACAGGAATTAACAAATCTCCTGAGGAGGCTGCCATCAAAATGACTGTGTT |
| | AACTGTTGTCCATCCTGGTGTATTCTACTCACATTTCAGACTCCTGCGAGAGGCTGA |
| | TTGACCTGGTTTGAATCTCGTGCCTACCCACTCGTAGTCCCTCCAGACCCCAGGGG |
| | GTGAGCGAAGGGTGTTTGCCTGAAGGAAGAGTGGAACAGGAGCTGGGCAGGGAA |
| | AAAAGAACAGATGTTCATTCTACTGGCCACATAGCCACAGTCAGTGGTAATGATTT |
| | TCCCTGGCCAGACTTGGTGGCCAGTAGTTACTAGTCTCCTTTCTCTTCAGAAACATC |
| | TGCTCTTGTCAGAGTTATAGCCTATTCTTGATGAGCTGCAGCAAAAATGTACCACTT |
| | AAATTGGAGATGGATCATTTCCTGAGGATCTCAGAATATCTTTTTCAGTTAGCTTTA |
| | TAAAGTAATTGTCCAGATGGCCATTTAATTTGTGATATGGGATAAAGTAATCTAGG |
| | GGAAAAAACACTTCTTTAAAATGACTTTTTTTTTTTGGGGGGGCCGGGCACACTGG |
| | CTTACACCTGTAATCCCAGCACTTTGCGAGGCCAAGCTGGGTGGATCACCTGGGGT |
| | C |
| mGRN | AGGGGAGATGATGGTTAAAGGATACAGAGCCTCAGAGAAGAGGAAAACTTTCTTT |
| paRNA 2 (−) | TTTCTAGTTCTATTGCACAGCATAGTGAATATAGTTTATCGTGTATGGTACCTTCCA |
| strand | AAATCGCTGAGTAAAATTTCAATGTTCTCACCACAAAAATAAGTATTTGAGGTGAT |
| SEQ ID NO: 8 | GGATATGTTAATTAGCATGATTAAATTATTCTACATGTATTCATAAATCATAACATC |
| | ACTTTATACCTATAAATTTATACAGCTGTAATTTGTCAGTTTACAAAGATAAGTATG |
| | TGAGGTAATGCCTATATTTATTTAGCGATTCCACATTGTGTACATATATCAAAATAT |
| | CATGTTGTACACCATAAATACAGTT |
| mGRN eRNA | GGGAAAAGGATAGTCTCTTTAATGAATTATGTTTGGAAAACTGGTTATCCACATGC |
| 1 (−) strand | AGAAGAATGAAATAGCACCCTGATATCAGACCACATGATTTCCATATGGAAAAAT |
| SEQ ID NO: 9 | CAACTCAAAATGAGTTAAAGATTTAACATGAATCCTGAAGTTGTAAAACTACTAGA |
| | AAAAAATAGGAAAAACTACACAACATTGGTCTGGGCAATGATATTTTAGATTTGGC |
| | CCCAAAAGCACAGGCAACAAAAACAAAAATAGACAAGATTACATCAAACTGAAA |
| | AGCTTCTGCATAAAAAGGAAACAACAGAATGAAGAGACATCATACAGATTGGGAG |
| | AAAATATTTGTAAGCCATTTATTTGTTAAAGGGTTAGTATTAAAATATATTAAGAA |
| | CTCAACTCTATAGAAAGAAAATAAATAATCCAATTTAAAAATGGGCAAGGAACCT |
| | GAATAGACAGACATTTCTCAAAAGAAGACATACAGATAG |

[0099] The present disclosure describes ASOs that increase the amount or stability of the target GRN regRNA, to thereby increase expression of the GRN gene. These ASOs are different from the ASOs previously described which were designed to inhibit eRNAs (see, e.g., PCT Application Publication No. WO2013/177248 and PCT Application Publication No. WO2017/075406). Without wishing to be bound by theory, it is hypothesized that the ASOs' ability to upregulate GRN regRNAs is attributable to the selection of a target sequence in the regRNA and/or the chemical modifications of the ASOs.

### Sequences of ASOs

[0100] In certain embodiments, the ASO disclosed herein is complementary to a sequence in the GRN regRNA that is no more than 300, 250, 200, 150, 100, 50, 40, 30, 20, or 10 nucleotides from the 5′ or 3′ end of the GRN regRNA. In certain embodiments, the ASO disclosed herein is complementary to a sequence in the GRN regRNA that is no more than 300, 250, 200, 150, 100, 50, 40, 30, 20, or 10 nucleotides from the 5′ end of the GRN regRNA (i.e., the 5′ most nucleotide of the regRNA sequence forming a duplex with the ASO is no more than 300, 250, 200, 150, 100, 50, 40, 30, 20, or 10 nucleotides from the 5′ end of the GRN regRNA). In certain embodiments, the ASO disclosed herein is complementary to a sequence in the GRN regRNA that is no more than 300, 250, 200, 150, 100, 50, 40, 30, 20, or 10 nucleotides from the 3′ end of the GRN regRNA (i.e., the 3′ most nucleotide of the GRN regRNA sequence forming a duplex with the ASO is no more than 300, 250, 200, 150, 100, 50, 40, 30, 20, or 10 nucleotides from the 3′ end of the GRN regRNA).

[0101] In certain embodiments, the ASO is no more than 25, 30, 40, 50, 60, 70, 80, 90, or 100 nucleotides in length. In certain embodiments, the ASO is designed to lack a stable secondary structure formed within itself or between each other, thereby increasing the amount of the ASO in a single-stranded form ready to hybridize with the GRN regRNA. Methods to predict secondary structures are known in the art (see, e.g., Seetin and Mathews, Methods Mol. Biol. (2012) 905:99-122; Zhao et al., PLoS Comput. Biol. (2021) 17(8):e1009291) and web-based programs (e.g., RNAfold) are available to public users.

[0102] For example, ASOs have been designed to target a human GRN paRNA or GRN eRNA. The nucleotide sequences of some of these hGRN ASOs are provided in FIG. 17. Additional ASOs have been designed to target a mouse GRN paRNA or eRNA. The nucleotide sequences of some of these mGRN ASOs are provided in FIG. 18. In some embodiments, an ASO provided herein comprises a nucleotide sequence of any one of SEQ ID NOS: 1369-4738. In some embodiments, an ASO provided herein comprises a nucleotide sequence as provided in Table 19, below.

TABLE 19
Exemplary ASO Sequences.

| SEQ | | SEQ | | SEQ | |
|---|---|---|---|---|---|
| ID | | ID | | ID | |
| NO | ASO_sequence | NO | ASO_sequence | NO | ASO_sequence |
| 1369 | CCTAGTGGAAGATAACGGAG | 2493 | GGCTGAGGCAGGAGAATCGC | 3618 | TGGTTAGCCATCCCCCTGCC |
| 1370 | ACCTAGTGGAAGATAACGGA | 2494 | AGGCTGAGGCAGGAGAATCG | 3619 | TTGGTTAGCCATCCCCCTGC |
| 1371 | CACCTAGTGGAAGATAACGG | 2495 | GAGGCTGAGGCAGGAGAATC | 3620 | CTTGGTTAGCCATCCCCCTG |
| 1372 | CCACCTAGTGGAAGATAACG | 2496 | GGAGGCTGAGGCAGGAGAAT | 3621 | GCTTGGTTAGCCATCCCCCT |
| 1373 | GCCACCTAGTGGAAGATAAC | 2497 | GGGAGGCTGAGGCAGGAGAA | 3622 | AGCTTGGTTAGCCATCCCCC |
| 1374 | TGCCACCTAGTGGAAGATAA | 2498 | CGGGAGGCTGAGGCAGGAGA | 3623 | GAGCTTGGTTAGCCATCCCC |
| 1375 | GTGCCACCTAGTGGAAGATA | 2499 | TCGGGAGGCTGAGGCAGGAG | 3624 | CGAGCTTGGTTAGCCATCCC |
| 1376 | GGTGCCACCTAGTGGAAGAT | 2500 | CTCGGGAGGCTGAGGCAGGA | 3625 | TCGAGCTTGGTTAGCCATCC |
| 1377 | GGGTGCCACCTAGTGGAAGA | 2501 | ACTCGGGAGGCTGAGGCAGG | 3626 | CTCGAGCTTGGTTAGCCATC |
| 1378 | GGGGTGCCACCTAGTGGAAG | 2502 | TACTCGGGAGGCTGAGGCAG | 3627 | CCTCGAGCTTGGTTAGCCAT |
| 1379 | GGGGGTGCCACCTAGTGGAA | 2503 | CTACTCGGGAGGCTGAGGCA | 3628 | GCCTCGAGCTTGGTTAGCCA |
| 1380 | GGGGGGTGCCACCTAGTGGA | 2504 | GCTACTCGGGAGGCTGAGGC | 3629 | TGCCTCGAGCTTGGTTAGCC |
| 1381 | TGGGGGGTGCCACCTAGTGG | 2505 | AGCTACTCGGGAGGCTGAGG | 3630 | CTGCCTCGAGCTTGGTTAGC |
| 1382 | TTGGGGGGTGCCACCTAGTG | 2506 | CAGCTACTCGGGAGGCTGAG | 3631 | GCTGCCTCGAGCTTGGTTAG |
| 1383 | GTTGGGGGGTGCCACCTAGT | 2507 | CCAGCTACTCGGGAGGCTGA | 3632 | TGCTGCCTCGAGCTTGGTTA |
| 1384 | AGTTGGGGGGTGCCACCTAG | 2508 | CCCAGCTACTCGGGAGGCTG | 3633 | CTGCTGCCTCGAGCTTGGTT |
| 1385 | GAGTTGGGGGGTGCCACCTA | 2509 | TCCCAGCTACTCGGGAGGCT | 3634 | TCTGCTGCCTCGAGCTTGGT |
| 1386 | GGAGTTGGGGGGTGCCACCT | 2510 | GTCCCAGCTACTCGGGAGGC | 3635 | TTCTGCTGCCTCGAGCTTGG |
| 1387 | CGGAGTTGGGGGGTGCCACC | 2511 | AGTCCCAGCTACTCGGGAGG | 3636 | CTTCTGCTGCCTCGAGCTTG |
| 1388 | TCGGAGTTGGGGGGTGCCAC | 2512 | TAGTCCCAGCTACTCGGGAG | 3637 | ACTTCTGCTGCCTCGAGCTT |
| 1389 | CTCGGAGTTGGGGGGTGCCA | 2513 | GTAGTCCCAGCTACTCGGGA | 3638 | GACTTCTGCTGCCTCGAGCT |
| 1390 | ACTCGGAGTTGGGGGGTGCC | 2514 | TGTAGTCCCAGCTACTCGGG | 3639 | CGACTTCTGCTGCCTCGAGC |
| 1391 | CACTCGGAGTTGGGGGGTGC | 2515 | CTGTAGTCCCAGCTACTCGG | 3640 | CCGACTTCTGCTGCCTCGAG |
| 1392 | GCACTCGGAGTTGGGGGGTG | 2516 | CCTGTAGTCCCAGCTACTCG | 3641 | TCCGACTTCTGCTGCCTCGA |
| 1393 | GGCACTCGGAGTTGGGGGGT | 2517 | GCCTGTAGTCCCAGCTACTC | 3642 | CTCCGACTTCTGCTGCCTCG |
| 1394 | TGGCACTCGGAGTTGGGGGG | 2518 | CGCCTGTAGTCCCAGCTACT | 3643 | CCTCCGACTTCTGCTGCCTC |
| 1395 | TTGGCACTCGGAGTTGGGGG | 2519 | GCGCCTGTAGTCCCAGCTAC | 3644 | TCCTCCGACTTCTGCTGCCT |
| 1396 | CTTGGCACTCGGAGTTGGGG | 2520 | CGCGCCTGTAGTCCCAGCTA | 3645 | CTCCTCCGACTTCTGCTGCC |
| 1397 | CCTTGGCACTCGGAGTTGGG | 2521 | GCGCGCCTGTAGTCCCAGCT | 3646 | CCTCCTCCGACTTCTGCTGC |
| 1398 | CCCTTGGCACTCGGAGTTGG | 2522 | TGCGCGCCTGTAGTCCCAGC | 3647 | CCCTCCTCCGACTTCTGCTG |
| 1399 | CCCCTTGGCACTCGGAGTTG | 2523 | GTGCGCGCCTGTAGTCCCAG | 3648 | TCCCTCCTCCGACTTCTGCT |
| 1400 | TCCCCTTGGCACTCGGAGTT | 2524 | GGTGCGCGCCTGTAGTCCCA | 3649 | TTCCCTCCTCCGACTTCTGC |
| 1401 | CTCCCCTTGGCACTCGGAGT | 2525 | TGGTGCGCGCCTGTAGTCCC | 3650 | TTTCCCTCCTCCGACTTCTG |
| 1402 | TCTCCCCTTGGCACTCGGAG | 2526 | GTGGTGCGCGCCTGTAGTCC | 3651 | CTTTCCCTCCTCCGACTTCT |
| 1403 | CTCTCCCCTTGGCACTCGGA | 2527 | GGTGGTGCGCGCCTGTAGTC | 3652 | CCTTTCCCTCCTCCGACTTC |
| 1404 | CCTCTCCCCTTGGCACTCGG | 2528 | TGGTGGTGCGCGCCTGTAGT | 3653 | CCCTTTCCCTCCTCCGACTT |
| 1405 | TCCTCTCCCCTTGGCACTCG | 2529 | GTGGTGGTGCGCGCCTGTAG | 3654 | ACCCTTTCCCTCCTCCGACT |
| 1406 | TTCCTCTCCCCTTGGCACTC | 2530 | CGTGGTGGTGCGCGCCTGTA | 3655 | CACCCTTTCCCTCCTCCGAC |
| 1407 | TTTCCTCTCCCCTTGGCACT | 2531 | GCGTGGTGGTGCGCGCCTGT | 3656 | GCACCCTTTCCCTCCTCCGA |
| 1408 | ATTTCCTCTCCCCTTGGCAC | 2532 | GGCGTGGTGGTGCGCGCCTG | 3657 | GGCACCCTTTCCCTCCTCCG |
| 1409 | AATTTCCTCTCCCCTTGGCA | 2533 | GGGCGTGGTGGTGCGCGCCT | 3658 | TGGCACCCTTTCCCTCCTCC |
| 1410 | GAATTTCCTCTCCCCTTGGC | 2534 | TGGGCGTGGTGGTGCGCGCC | 3659 | TTGGCACCCTTTCCCTCCTC |
| 1411 | GGAATTTCCTCTCCCCTTGG | 2535 | CTGGGCGTGGTGGTGCGCGC | 3660 | GTTGGCACCCTTTCCCTCCT |
| 1412 | GGGAATTTCCTCTCCCCTTG | 2536 | GCTGGGCGTGGTGGTGCGCG | 3661 | GGTTGGCACCCTTTCCCTCC |
| 1413 | TGGGAATTTCCTCTCCCCTT | 2537 | AGCTGGGCGTGGTGGTGCGC | 3662 | CGGTTGGCACCCTTTCCCTC |
| 1414 | TTGGGAATTTCCTCTCCCCT | 2538 | TAGCTGGGCGTGGTGGTGCG | 3663 | TCGGTTGGCACCCTTTCCCT |
| 1415 | TTTGGGAATTTCCTCTCCCC | 2539 | TTAGCTGGGCGTGGTGGTGC | 3664 | CTCGGTTGGCACCCTTTCCC |
| 1416 | TTTTGGGAATTTCCTCTCCC | 2540 | ATTAGCTGGGCGTGGTGGTG | 3665 | GCTCGGTTGGCACCCTTTCC |
| 1417 | CTTTTGGGAATTTCCTCTCC | 2541 | AATTAGCTGGGCGTGGTGGT | 3666 | AGCTCGGTTGGCACCCTTTC |
| 1418 | CCTTTTGGGAATTTCCTCTC | 2542 | AAATTAGCTGGGCGTGGTGG | 3667 | CAGCTCGGTTGGCACCCTTT |
| 1419 | CCCTTTTGGGAATTTCCTCT | 2543 | AAAATTAGCTGGGCGTGGTG | 3668 | ACAGCTCGGTTGGCACCCTT |
| 1420 | CCCCTTTTGGGAATTTCCTC | 2544 | AAAAATTAGCTGGGCGTGGT | 3669 | CACAGCTCGGTTGGCACCCT |
| 1421 | TCCCCTTTTGGGAATTTCCT | 2545 | CAAAAATTAGCTGGGCGTGG | 3670 | CCACAGCTCGGTTGGCACCC |
| 1422 | CTCCCCTTTTGGGAATTTCC | 2546 | ACAAAAATTAGCTGGGCGTG | 3671 | TCCACAGCTCGGTTGGCACC |
| 1423 | GCTCCCCTTTTGGGAATTTC | 2547 | TACAAAAATTAGCTGGGCGT | 3672 | CTCCACAGCTCGGTTGGCAC |
| 1424 | GGCTCCCCTTTTGGGAATTT | 2548 | ATACAAAAATTAGCTGGGCG | 3673 | ACTCCACAGCTCGGTTGGCA |
| 1425 | TGGCTCCCCTTTTGGGAATT | 2549 | AATACAAAAATTAGCTGGGC | 3674 | GACTCCACAGCTCGGTTGGC |
| 1426 | TTGGCTCCCCTTTTGGGAAT | 2550 | AAATACAAAAATTAGCTGGG | 3675 | CGACTCCACAGCTCGGTTGG |
| 1427 | GTTGGCTCCCCTTTTGGGAA | 2551 | AAAATACAAAAATTAGCTGG | 3676 | ACGACTCCACAGCTCGGTTG |
| 1428 | GGTTGGCTCCCCTTTTGGGA | 2552 | AAAAATACAAAAATTAGCTG | 3677 | CACGACTCCACAGCTCGGTT |
| 1429 | AGGTTGGCTCCCCTTTTGGG | 2553 | TAAAAATACAAAAATTAGCT | 3678 | ACACGACTCCACAGCTCGGT |
| 1430 | TAGGTTGGCTCCCCTTTTGG | 2554 | CTAAAAATACAAAAATTAGC | 3679 | CACACGACTCCACAGCTCGG |
| 1431 | CTAGGTTGGCTCCCCTTTTG | 2555 | ACTAAAAATACAAAAATTAG | 3680 | CCACACGACTCCACAGCTCG |
| 1432 | GCTAGGTTGGCTCCCCTTTT | 2556 | TACTAAAAATACAAAAATTA | 3681 | GCCACACGACTCCACAGCTC |
| 1433 | AGCTAGGTTGGCTCCCCTTT | 2557 | CTACTAAAAATACAAAAATT | 3682 | TGCCACACGACTCCACAGCT |
| 1434 | CAGCTAGGTTGGCTCCCCTT | 2558 | TCTACTAAAAATACAAAAAT | 3683 | CTGCCACACGACTCCACAGC |
| 1435 | GCAGCTAGGTTGGCTCCCCT | 2559 | CTCTACTAAAAATACAAAAA | 3684 | CCTGCCACACGACTCCACAG |
| 1436 | TGCAGCTAGGTTGGCTCCCC | 2560 | TCTCTACTAAAAATACAAAA | 3685 | CCCTGCCACACGACTCCACA |
| 1437 | TTGCAGCTAGGTTGGCTCCC | 2561 | GTCTCTACTAAAAATACAAA | 3686 | CCCCTGCCACACGACTCCAC |
| 1438 | TTTGCAGCTAGGTTGGCTCC | 2562 | CGTCTCTACTAAAAATACAA | 3687 | ACCCCTGCCACACGACTCCA |
| 1439 | ATTTGCAGCTAGGTTGGCTC | 2563 | CCGTCTCTACTAAAAATACA | 3688 | AACCCCTGCCACACGACTCC |
| 1440 | CATTTGCAGCTAGGTTGGCT | 2564 | CCCGTCTCTACTAAAAATAC | 3689 | GAACCCCTGCCACACGACTC |
| 1441 | TCATTTGCAGCTAGGTTGGC | 2565 | CCCCGTCTCTACTAAAAATA | 3690 | AGAACCCCTGCCACACGACT |
| 1442 | CTCATTTGCAGCTAGGTTGG | 2566 | ACCCCGTCTCTACTAAAAAT | 3691 | TAGAACCCCTGCCACACGAC |
| 1443 | GCTCATTTGCAGCTAGGTTG | 2567 | AACCCCGTCTCTACTAAAAA | 3692 | TTAGAACCCCTGCCACACGA |
| 1444 | TGCTCATTTGCAGCTAGGTT | 2568 | AAACCCCGTCTCTACTAAAA | 3693 | CTTAGAACCCCTGCCACACG |
| 1445 | CTGCTCATTTGCAGCTAGGT | 2569 | GAAACCCCGTCTCTACTAAA | 3694 | GCTTAGAACCCCTGCCACAC |
| 1446 | CCTGCTCATTTGCAGCTAGG | 2570 | TGAAACCCCGTCTCTACTAA | 3695 | GGCTTAGAACCCCTGCCACA |
| 1447 | TCCTGCTCATTTGCAGCTAG | 2571 | GTGAAACCCCGTCTCTACTA | 3696 | AGGCTTAGAACCCCTGCCAC |
| 1448 | TTCCTGCTCATTTGCAGCTA | 2572 | GGTGAAACCCCGTCTCTACT | 3697 | CAGGCTTAGAACCCCTGCCA |
| 1449 | TTTCCTGCTCATTTGCAGCT | 2573 | TGGTGAAACCCCGTCTCTAC | 3698 | CCAGGCTTAGAACCCCTGCC |
| 1450 | TTTTCCTGCTCATTTGCAGC | 2574 | ATGGTGAAACCCCGTCTCTA | 3699 | TCCAGGCTTAGAACCCCTGC |
| 1451 | TTTTTCCTGCTCATTTGCAG | 2575 | CATGGTGAAACCCCGTCTCT | 3700 | CTCCAGGCTTAGAACCCCTG |
| 1452 | CTTTTTCCTGCTCATTTGCA | 2576 | ACATGGTGAAACCCCGTCTC | 3701 | GCTCCAGGCTTAGAACCCCT |
| 1453 | ACTTTTTCCTGCTCATTTGC | 2577 | AACATGGTGAAACCCCGTCT | 3702 | AGCTCCAGGCTTAGAACCCC |
| 1454 | CACTTTTTCCTGCTCATTTG | 2578 | CAACATGGTGAAACCCCGTC | 3703 | TAGCTCCAGGCTTAGAACCC |
| 1455 | CCACTTTTTCCTGCTCATTT | 2579 | CCAACATGGTGAAACCCCGT | 3704 | CTAGCTCCAGGCTTAGAACC |
| 1456 | GCCACTTTTTCCTGCTCATT | 2580 | GCCAACATGGTGAAACCCCG | 3705 | TCTAGCTCCAGGCTTAGAAC |
| 1457 | AGCCACTTTTTCCTGCTCAT | 2581 | GGCCAACATGGTGAAACCCC | 3706 | CTCTAGCTCCAGGCTTAGAA |
| 1458 | CAGCCACTTTTTCCTGCTCA | 2582 | TGGCCAACATGGTGAAACCC | 3707 | GCTCTAGCTCCAGGCTTAGA |
| 1459 | CCAGCCACTTTTTCCTGCTC | 2583 | CTGGCCAACATGGTGAAACC | 3708 | TGCTCTAGCTCCAGGCTTAG |
| 1460 | CCCAGCCACTTTTTCCTGCT | 2584 | CCTGGCCAACATGGTGAAAC | 3709 | CTGCTCTAGCTCCAGGCTTA |
| 1461 | TCCCAGCCACTTTTTCCTGC | 2585 | TCCTGGCCAACATGGTGAAA | 3710 | TCTGCTCTAGCTCCAGGCTT |
| 1462 | CTCCCAGCCACTTTTTCCTG | 2586 | ATCCTGGCCAACATGGTGAA | 3711 | GTCTGCTCTAGCTCCAGGCT |
| 1463 | TCTCCCAGCCACTTTTTCCT | 2587 | CATCCTGGCCAACATGGTGA | 3712 | GGTCTGCTCTAGCTCCAGGC |
| 1464 | CTCTCCCAGCCACTTTTTCC | 2588 | CCATCCTGGCCAACATGGTG | 3713 | GGGTCTGCTCTAGCTCCAGG |
| 1465 | CCTCTCCCAGCCACTTTTTC | 2589 | ACCATCCTGGCCAACATGGT | 3714 | TGGGTCTGCTCTAGCTCCAG |
| 1466 | GCCTCTCCCAGCCACTTTTT | 2590 | GACCATCCTGGCCAACATGG | 3715 | CTGGGTCTGCTCTAGCTCCA |
| 1467 | CGCCTCTCCCAGCCACTTTT | 2591 | AGACCATCCTGGCCAACATG | 3716 | TCTGGGTCTGCTCTAGCTCC |
| 1468 | CCGCCTCTCCCAGCCACTTT | 2592 | GAGACCATCCTGGCCAACAT | 3717 | GTCTGGGTCTGCTCTAGCTC |
| 1469 | TCCGCCTCTCCCAGCCACTT | 2593 | CGAGACCATCCTGGCCAACA | 3718 | TGTCTGGGTCTGCTCTAGCT |
| 1470 | TTCCGCCTCTCCCAGCCACT | 2594 | TCGAGACCATCCTGGCCAAC | 3719 | CTGTCTGGGTCTGCTCTAGC |
| 1471 | CTTCCGCCTCTCCCAGCCAC | 2595 | ATCGAGACCATCCTGGCCAA | 3720 | GCTGTCTGGGTCTGCTCTAG |
| 1472 | GCTTCCGCCTCTCCCAGCCA | 2596 | AATCGAGACCATCCTGGCCA | 3721 | CGCTGTCTGGGTCTGCTCTA |
| 1473 | AGCTTCCGCCTCTCCCAGCC | 2597 | AAATCGAGACCATCCTGGCC | 3722 | CCGCTGTCTGGGTCTGCTCT |
| 1474 | TAGCTTCCGCCTCTCCCAGC | 2598 | GAAATCGAGACCATCCTGGC | 3723 | TCCGCTGTCTGGGTCTGCTC |
| 1475 | CTAGCTTCCGCCTCTCCCAG | 2599 | AGAAATCGAGACCATCCTGG | 3724 | ATCCGCTGTCTGGGTCTGCT |
| 1476 | GCTAGCTTCCGCCTCTCCCA | 2600 | AAGAAATCGAGACCATCCTG | 3725 | TATCCGCTGTCTGGGTCTGC |
| 1477 | AGCTAGCTTCCGCCTCTCCC | 2601 | CAAGAAATCGAGACCATCCT | 3726 | TTATCCGCTGTCTGGGTCTG |
| 1478 | GAGCTAGCTTCCGCCTCTCC | 2602 | TCAAGAAATCGAGACCATCC | 3727 | CTTATCCGCTGTCTGGGTCT |
| 1479 | CGAGCTAGCTTCCGCCTCTC | 2603 | GTCAAGAAATCGAGACCATC | 3728 | TCTTATCCGCTGTCTGGGTC |
| 1480 | ACGAGCTAGCTTCCGCCTCT | 2604 | GGTCAAGAAATCGAGACCAT | 3729 | GTCTTATCCGCTGTCTGGGT |
| 1481 | GACGAGCTAGCTTCCGCCTC | 2605 | AGGTCAAGAAATCGAGACCA | 3730 | TGTCTTATCCGCTGTCTGGG |
| 1482 | GGACGAGCTAGCTTCCGCCT | 2606 | GAGGTCAAGAAATCGAGACC | 3731 | GTGTCTTATCCGCTGTCTGG |
| 1483 | GGGACGAGCTAGCTTCCGCC | 2607 | CGAGGTCAAGAAATCGAGAC | 3732 | GGTGTCTTATCCGCTGTCTG |
| 1484 | TGGGACGAGCTAGCTTCCGC | 2608 | ACGAGGTCAAGAAATCGAGA | 3733 | AGGTGTCTTATCCGCTGTCT |
| 1485 | GTGGGACGAGCTAGCTTCCG | 2609 | CACGAGGTCAAGAAATCGAG | 3734 | CAGGTGTCTTATCCGCTGTC |
| 1486 | GGTGGGACGAGCTAGCTTCC | 2610 | TCACGAGGTCAAGAAATCGA | 3735 | CCAGGTGTCTTATCCGCTGT |
| 1487 | GGGTGGGACGAGCTAGCTTC | 2611 | ATCACGAGGTCAAGAAATCG | 3736 | GCCAGGTGTCTTATCCGCTG |
| 1488 | CGGGTGGGACGAGCTAGCTT | 2612 | GATCACGAGGTCAAGAAATC | 3737 | GGCCAGGTGTCTTATCCGCT |
| 1489 | GCGGGTGGGACGAGCTAGCT | 2613 | GGATCACGAGGTCAAGAAAT | 3738 | AGGCCAGGTGTCTTATCCGC |
| 1490 | TGCGGGTGGGACGAGCTAGC | 2614 | CGGATCACGAGGTCAAGAAA | 3739 | CAGGCCAGGTGTCTTATCCG |
| 1491 | TTGCGGGTGGGACGAGCTAG | 2615 | GCGGATCACGAGGTCAAGAA | 3740 | GCAGGCCAGGTGTCTTATCC |
| 1492 | GTTGCGGGTGGGACGAGCTA | 2616 | GGCGGATCACGAGGTCAAGA | 3741 | AGCAGGCCAGGTGTCTTATC |
| 1493 | TGTTGCGGGTGGGACGAGCT | 2617 | GGGCGGATCACGAGGTCAAG | 3742 | CAGCAGGCCAGGTGTCTTAT |
| 1494 | TTGTTGCGGGTGGGACGAGC | 2618 | TGGGCGGATCACGAGGTCAA | 3743 | TCAGCAGGCCAGGTGTCTTA |
| 1495 | CTTGTTGCGGGTGGGACGAG | 2619 | GTGGGCGGATCACGAGGTCA | 3744 | CTCAGCAGGCCAGGTGTCTT |
| 1496 | TCTTGTTGCGGGTGGGACGA | 2620 | GGTGGGCGGATCACGAGGTC | 3745 | CCTCAGCAGGCCAGGTGTCT |
| 1497 | CTCTTGTTGCGGGTGGGACG | 2621 | AGGTGGGCGGATCACGAGGT | 3746 | TCCTCAGCAGGCCAGGTGTC |
| 1498 | CCTCTTGTTGCGGGTGGGAC | 2622 | GAGGTGGGCGGATCACGAGG | 3747 | GTCCTCAGCAGGCCAGGTGT |
| 1499 | TCCTCTTGTTGCGGGTGGGA | 2623 | CGAGGTGGGCGGATCACGAG | 3748 | GGTCCTCAGCAGGCCAGGTG |
| 1500 | TTCCTCTTGTTGCGGGTGGG | 2624 | CCGAGGTGGGCGGATCACGA | 3749 | AGGTCCTCAGCAGGCCAGGT |
| 1501 | CTTCCTCTTGTTGCGGGTGG | 2625 | GCCGAGGTGGGCGGATCACG | 3750 | TAGGTCCTCAGCAGGCCAGG |
| 1502 | ACTTCCTCTTGTTGCGGGTG | 2626 | GGCCGAGGTGGGCGGATCAC | 3751 | CTAGGTCCTCAGCAGGCCAG |
| 1503 | TACTTCCTCTTGTTGCGGGT | 2627 | AGGCCGAGGTGGGCGGATCA | 3752 | ACTAGGTCCTCAGCAGGCCA |
| 1504 | TTACTTCCTCTTGTTGCGGG | 2628 | GAGGCCGAGGTGGGCGGATC | 3753 | TACTAGGTCCTCAGCAGGCC |
| 1505 | CTTACTTCCTCTTGTTGCGG | 2629 | GGAGGCCGAGGTGGGCGGAT | 3754 | GTACTAGGTCCTCAGCAGGC |
| 1506 | CCTTACTTCCTCTTGTTGCG | 2630 | GGGAGGCCGAGGTGGGCGGA | 3755 | AGTACTAGGTCCTCAGCAGG |
| 1507 | TCCTTACTTCCTCTTGTTGC | 2631 | TGGGAGGCCGAGGTGGGCGG | 3756 | TAGTACTAGGTCCTCAGCAG |
| 1508 | CTCCTTACTTCCTCTTGTTG | 2632 | TTGGGAGGCCGAGGTGGGCG | 3757 | CTAGTACTAGGTCCTCAGCA |
| 1509 | CCTCCTTACTTCCTCTTGTT | 2633 | TTTGGGAGGCCGAGGTGGGC | 3758 | ACTAGTACTAGGTCCTCAGC |
| 1510 | TCCTCCTTACTTCCTCTTGT | 2634 | CTTTGGGAGGCCGAGGTGGG | 3759 | GACTAGTACTAGGTCCTCAG |
| 1511 | CTCCTCCTTACTTCCTCTTG | 2635 | ACTTTGGGAGGCCGAGGTGG | 3760 | AGACTAGTACTAGGTCCTCA |
| 1512 | GCTCCTCCTTACTTCCTCTT | 2636 | CACTTTGGGAGGCCGAGGTG | 3761 | CAGACTAGTACTAGGTCCTC |
| 1513 | GGCTCCTCCTTACTTCCTCT | 2637 | GCACTTTGGGAGGCCGAGGT | 3762 | ACAGACTAGTACTAGGTCCT |
| 1514 | TGGCTCCTCCTTACTTCCTC | 2638 | AGCACTTTGGGAGGCCGAGG | 3763 | CACAGACTAGTACTAGGTCC |
| 1515 | CTGGCTCCTCCTTACTTCCT | 2639 | TAGCACTTTGGGAGGCCGAG | 3764 | GCACAGACTAGTACTAGGTC |
| 1516 | TCTGGCTCCTCCTTACTTCC | 2640 | TTAGCACTTTGGGAGGCCGA | 3765 | GGCACAGACTAGTACTAGGT |
| 1517 | GTCTGGCTCCTCCTTACTTC | 2641 | CTTAGCACTTTGGGAGGCCG | 3766 | GGGCACAGACTAGTACTAGG |
| 1518 | GGTCTGGCTCCTCCTTACTT | 2642 | TCTTAGCACTTTGGGAGGCC | 3767 | AGGGCACAGACTAGTACTAG |
| 1519 | TGGTCTGGCTCCTCCTTACT | 2643 | ATCTTAGCACTTTGGGAGGC | 3768 | CAGGGCACAGACTAGTACTA |
| 1520 | CTGGTCTGGCTCCTCCTTAC | 2644 | AATCTTAGCACTTTGGGAGG | 3769 | CCAGGGCACAGACTAGTACT |
| 1521 | CCTGGTCTGGCTCCTCCTTA | 2645 | TAATCTTAGCACTTTGGGAG | 3770 | ACCAGGGCACAGACTAGTAC |
| 1522 | ACCTGGTCTGGCTCCTCCTT | 2646 | GTAATCTTAGCACTTTGGGA | 3771 | CACCAGGGCACAGACTAGTA |
| 1523 | AACCTGGTCTGGCTCCTCCT | 2647 | TGTAATCTTAGCACTTTGGG | 3772 | TCACCAGGGCACAGACTAGT |
| 1524 | GAACCTGGTCTGGCTCCTCC | 2648 | CTGTAATCTTAGCACTTTGG | 3773 | GTCACCAGGGCACAGACTAG |
| 1525 | TGAACCTGGTCTGGCTCCTC | 2649 | CCTGTAATCTTAGCACTTTG | 3774 | TGTCACCAGGGCACAGACTA |
| 1526 | CTGAACCTGGTCTGGCTCCT | 2650 | GCCTGTAATCTTAGCACTTT | 3775 | GTGTCACCAGGGCACAGACT |
| 1527 | ACTGAACCTGGTCTGGCTCC | 2651 | TGCCTGTAATCTTAGCACTT | 3776 | TGTGTCACCAGGGCACAGAC |
| 1528 | GACTGAACCTGGTCTGGCTC | 2652 | ATGCCTGTAATCTTAGCACT | 3777 | ATGTGTCACCAGGGCACAGA |
| 1529 | TGACTGAACCTGGTCTGGCT | 2653 | CATGCCTGTAATCTTAGCAC | 3778 | AATGTGTCACCAGGGCACAG |
| 1530 | GTGACTGAACCTGGTCTGGC | 2654 | TCATGCCTGTAATCTTAGCA | 3779 | AAATGTGTCACCAGGGCACA |
| 1531 | GGTGACTGAACCTGGTCTGG | 2655 | CTCATGCCTGTAATCTTAGC | 3780 | CAAATGTGTCACCAGGGCAC |
| 1532 | TGGTGACTGAACCTGGTCTG | 2656 | GCTCATGCCTGTAATCTTAG | 3781 | ACAAATGTGTCACCAGGGCA |
| 1533 | GTGGTGACTGAACCTGGTCT | 2657 | GGCTCATGCCTGTAATCTTA | 3782 | CACAAATGTGTCACCAGGGC |
| 1534 | AGTGGTGACTGAACCTGGTC | 2658 | TGGCTCATGCCTGTAATCTT | 3783 | GCACAAATGTGTCACCAGGG |
| 1535 | GAGTGGTGACTGAACCTGGT | 2659 | GTGGCTCATGCCTGTAATCT | 3784 | AGCACAAATGTGTCACCAGG |
| 1536 | GGAGTGGTGACTGAACCTGG | 2660 | GGTGGCTCATGCCTGTAATC | 3785 | AAGCACAAATGTGTCACCAG |
| 1537 | GGGAGTGGTGACTGAACCTG | 2661 | CGGTGGCTCATGCCTGTAAT | 3786 | TAAGCACAAATGTGTCACCA |
| 1538 | TGGGAGTGGTGACTGAACCT | 2662 | GCGGTGGCTCATGCCTGTAA | 3787 | ATAAGCACAAATGTGTCACC |
| 1539 | TTGGGAGTGGTGACTGAACC | 2663 | CGCGGTGGCTCATGCCTGTA | 3788 | AATAAGCACAAATGTGTCAC |
| 1540 | CTTGGGAGTGGTGACTGAAC | 2664 | GCGCGGTGGCTCATGCCTGT | 3789 | AAATAAGCACAAATGTGTCA |
| 1541 | ACTTGGGAGTGGTGACTGAA | 2665 | GGCGCGGTGGCTCATGCCTG | 3790 | AAAATAAGCACAAATGTGTC |
| 1542 | GACTTGGGAGTGGTGACTGA | 2666 | GGGCGCGGTGGCTCATGCCT | 3791 | GAAAATAAGCACAAATGTGT |
| 1543 | GGACTTGGGAGTGGTGACTG | 2667 | CGGGCGCGGTGGCTCATGCC | 3792 | GGAAAATAAGCACAAATGTG |
| 1544 | GGGACTTGGGAGTGGTGACT | 2668 | CCGGGCGCGGTGGCTCATGC | 3793 | AGGAAAATAAGCACAAATGT |
| 1545 | AGGGACTTGGGAGTGGTGAC | 2669 | TCCGGGCGCGGTGGCTCATG | 3794 | AAGGAAAATAAGCACAAATG |
| 1546 | TAGGGACTTGGGAGTGGTGA | 2670 | GTCCGGGCGCGGTGGCTCAT | 3795 | GAAGGAAAATAAGCACAAAT |
| 1547 | GTAGGGACTTGGGAGTGGTG | 2671 | AGTCCGGGCGCGGTGGCTCA | 3796 | GGAAGGAAAATAAGCACAAA |
| 1548 | AGTAGGGACTTGGGAGTGGT | 2672 | AAGTCCGGGCGCGGTGGCTC | 3797 | AGGAAGGAAAATAAGCACAA |
| 1549 | TAGTAGGGACTTGGGAGTGG | 2673 | CAAGTCCGGGCGCGGTGGCT | 3798 | CAGGAAGGAAAATAAGCACA |
| 1550 | GTAGTAGGGACTTGGGAGTG | 2674 | ACAAGTCCGGGCGCGGTGGC | 3799 | ACAGGAAGGAAAATAAGCAC |
| 1551 | GGTAGTAGGGACTTGGGAGT | 2675 | CACAAGTCCGGGCGCGGTGG | 3800 | CACAGGAAGGAAAATAAGCA |
| 1552 | AGGTAGTAGGGACTTGGGAG | 2676 | ACACAAGTCCGGGCGCGGTG | 3801 | ACACAGGAAGGAAAATAAGC |
| 1553 | AAGGTAGTAGGGACTTGGGA | 2677 | CACACAAGTCCGGGCGCGGT | 3802 | TACACAGGAAGGAAAATAAG |
| 1554 | GAAGGTAGTAGGGACTTGGG | 2678 | ACACACAAGTCCGGGCGCGG | 3803 | ATACACAGGAAGGAAAATAA |
| 1555 | CGAAGGTAGTAGGGACTTGG | 2679 | AACACACAAGTCCGGGCGCG | 3804 | GATACACAGGAAGGAAAATA |
| 1556 | TCGAAGGTAGTAGGGACTTG | 2680 | AAACACACAAGTCCGGGCGC | 3805 | AGATACACAGGAAGGAAAAT |
| 1557 | CTCGAAGGTAGTAGGGACTT | 2681 | CAAACACACAAGTCCGGGCG | 3806 | AAGATACACAGGAAGGAAAA |
| 1558 | TCTCGAAGGTAGTAGGGACT | 2682 | ACAAACACACAAGTCCGGGC | 3807 | CAAGATACACAGGAAGGAAA |
| 1559 | TTCTCGAAGGTAGTAGGGAC | 2683 | AACAAACACACAAGTCCGGG | 3808 | TCAAGATACACAGGAAGGAA |
| 1560 | CTTCTCGAAGGTAGTAGGGA | 2684 | AAACAAACACACAAGTCCGG | 3809 | CTCAAGATACACAGGAAGGA |
| 1561 | GCTTCTCGAAGGTAGTAGGG | 2685 | AAAACAAACACACAAGTCCG | 3810 | TCTCAAGATACACAGGAAGG |
| 1562 | GGCTTCTCGAAGGTAGTAGG | 2686 | TAAAACAAACACACAAGTCC | 3811 | GTCTCAAGATACACAGGAAG |
| 1563 | TGGCTTCTCGAAGGTAGTAG | 2687 | CTAAAACAAACACACAAGTC | 3812 | AGTCTCAAGATACACAGGAA |
| 1564 | TTGGCTTCTCGAAGGTAGTA | 2688 | TCTAAAACAAACACACAAGT | 3813 | TAGTCTCAAGATACACAGGA |
| 1565 | CTTGGCTTCTCGAAGGTAGT | 2689 | CTCTAAAACAAACACACAAG | 3814 | CTAGTCTCAAGATACACAGG |
| 1566 | CCTTGGCTTCTCGAAGGTAG | 2690 | TCTCTAAAACAAACACACAA | 3815 | CCTAGTCTCAAGATACACAG |
| 1567 | ACCTTGGCTTCTCGAAGGTA | 2691 | GTCTCTAAAACAAACACACA | 3816 | CCCTAGTCTCAAGATACACA |
| 1568 | GACCTTGGCTTCTCGAAGGT | 2692 | TGTCTCTAAAACAAACACAC | 3817 | TCCCTAGTCTCAAGATACAC |
| 1569 | AGACCTTGGCTTCTCGAAGG | 2693 | CTGTCTCTAAAACAAACACA | 3818 | CTCCCTAGTCTCAAGATACA |
| 1570 | GAGACCTTGGCTTCTCGAAG | 2694 | CCTGTCTCTAAAACAAACAC | 3819 | ACTCCCTAGTCTCAAGATAC |
| 1571 | TGAGACCTTGGCTTCTCGAA | 2695 | CCCTGTCTCTAAAACAAACA | 3820 | TACTCCCTAGTCTCAAGATA |
| 1572 | CTGAGACCTTGGCTTCTCGA | 2696 | ACCCTGTCTCTAAAACAAAC | 3821 | ATACTCCCTAGTCTCAAGAT |
| 1573 | CCTGAGACCTTGGCTTCTCG | 2697 | GACCCTGTCTCTAAAACAAA | 3822 | TATACTCCCTAGTCTCAAGA |
| 1574 | ACCTGAGACCTTGGCTTCTC | 2698 | AGACCCTGTCTCTAAAACAA | 3823 | CTATACTCCCTAGTCTCAAG |
| 1575 | GACCTGAGACCTTGGCTTCT | 2699 | GAGACCCTGTCTCTAAAACA | 3824 | ACTATACTCCCTAGTCTCAA |
| 1576 | AGACCTGAGACCTTGGCTTC | 2700 | CGAGACCCTGTCTCTAAAAC | 3825 | AACTATACTCCCTAGTCTCA |
| 1577 | GAGACCTGAGACCTTGGCTT | 2701 | GCGAGACCCTGTCTCTAAAA | 3826 | AAACTATACTCCCTAGTCTC |
| 1578 | CGAGACCTGAGACCTTGGCT | 2702 | AGCGAGACCCTGTCTCTAAA | 3827 | TAAACTATACTCCCTAGTCT |
| 1579 | ACGAGACCTGAGACCTTGGC | 2703 | GAGCGAGACCCTGTCTCTAA | 3828 | ATAAACTATACTCCCTAGTC |
| 1580 | AACGAGACCTGAGACCTTGG | 2704 | TGAGCGAGACCCTGTCTCTA | 3829 | CATAAACTATACTCCCTAGT |
| 1581 | GAACGAGACCTGAGACCTTG | 2705 | CTGAGCGAGACCCTGTCTCT | 3830 | GCATAAACTATACTCCCTAG |
| 1582 | GGAACGAGACCTGAGACCTT | 2706 | ACTGAGCGAGACCCTGTCTC | 3831 | AGCATAAACTATACTCCCTA |
| 1583 | GGGAACGAGACCTGAGACCT | 2707 | GACTGAGCGAGACCCTGTCT | 3832 | AAGCATAAACTATACTCCCT |
| 1584 | TGGGAACGAGACCTGAGACC | 2708 | CGACTGAGCGAGACCCTGTC | 3833 | GAAGCATAAACTATACTCCC |
| 1585 | CTGGGAACGAGACCTGAGAC | 2709 | GCGACTGAGCGAGACCCTGT | 3834 | AGAAGCATAAACTATACTCC |
| 1586 | CCTGGGAACGAGACCTGAGA | 2710 | GGCGACTGAGCGAGACCCTG | 3835 | TAGAAGCATAAACTATACTC |
| 1587 | GCCTGGGAACGAGACCTGAG | 2711 | GGGCGACTGAGCGAGACCCT | 3836 | ATAGAAGCATAAACTATACT |
| 1588 | GGCCTGGGAACGAGACCTGA | 2712 | TGGGCGACTGAGCGAGACCC | 3837 | AATAGAAGCATAAACTATAC |
| 1589 | GGGCCTGGGAACGAGACCTG | 2713 | TTGGGCGACTGAGCGAGACC | 3838 | CAATAGAAGCATAAACTATA |
| 1590 | AGGGCCTGGGAACGAGACCT | 2714 | CTTGGGCGACTGAGCGAGAC | 3839 | TCAATAGAAGCATAAACTAT |
| 1591 | GAGGGCCTGGGAACGAGACC | 2715 | GCTTGGGCGACTGAGCGAGA | 3840 | TTCAATAGAAGCATAAACTA |
| 1592 | CGAGGGCCTGGGAACGAGAC | 2716 | AGCTTGGGCGACTGAGCGAG | 3841 | TTTCAATAGAAGCATAAACT |
| 1593 | CCGAGGGCCTGGGAACGAGA | 2717 | CAGCTTGGGCGACTGAGCGA | 3842 | GTTTCAATAGAAGCATAAAC |
| 1594 | TCCGAGGGCCTGGGAACGAG | 2718 | TCAGCTTGGGCGACTGAGCG | 3843 | TGTTTCAATAGAAGCATAAA |
| 1595 | CTCCGAGGGCCTGGGAACGA | 2719 | ATCAGCTTGGGCGACTGAGC | 3844 | GTGTTTCAATAGAAGCATAA |
| 1596 | GCTCCGAGGGCCTGGGAACG | 2720 | GATCAGCTTGGGCGACTGAG | 3845 | TGTGTTTCAATAGAAGCATA |
| 1597 | AGCTCCGAGGGCCTGGGAAC | 2721 | TGATCAGCTTGGGCGACTGA | 3846 | GTGTGTTTCAATAGAAGCAT |
| 1598 | GAGCTCCGAGGGCCTGGGAA | 2722 | ATGATCAGCTTGGGCGACTG | 3847 | TGTGTGTTTCAATAGAAGCA |
| 1599 | GGAGCTCCGAGGGCCTGGGA | 2723 | TATGATCAGCTTGGGCGACT | 3848 | GTGTGTGTTTCAATAGAAGC |
| 1600 | GGGAGCTCCGAGGGCCTGGG | 2724 | CTATGATCAGCTTGGGCGAC | 3849 | TGTGTGTGTTTCAATAGAAG |
| 1601 | TGGGAGCTCCGAGGGCCTGG | 2725 | GCTATGATCAGCTTGGGCGA | 3850 | GTGTGTGTGTTTCAATAGAA |
| 1602 | CTGGGAGCTCCGAGGGCCTG | 2726 | AGCTATGATCAGCTTGGGCG | 3851 | TGTGTGTGTGTTTCAATAGA |
| 1603 | GCTGGGAGCTCCGAGGGCCT | 2727 | GAGCTATGATCAGCTTGGGC | 3852 | GTGTGTGTGTGTTTCAATAG |
| 1604 | GGCTGGGAGCTCCGAGGGCC | 2728 | TGAGCTATGATCAGCTTGGG | 3853 | TGTGTGTGTGTGTTTCAATA |
| 1605 | GGGCTGGGAGCTCCGAGGGC | 2729 | GTGAGCTATGATCAGCTTGG | 3854 | ATGTGTGTGTGTGTTTCAAT |
| 1606 | TGGGCTGGGAGCTCCGAGGG | 2730 | AGTGAGCTATGATCAGCTTG | 3855 | CATGTGTGTGTGTGTTTCAA |
| 1607 | CTGGGCTGGGAGCTCCGAGG | 2731 | CAGTGAGCTATGATCAGCTT | 3856 | TCATGTGTGTGTGTGTTTCA |
| 1608 | CCTGGGCTGGGAGCTCCGAG | 2732 | GCAGTGAGCTATGATCAGCT | 3857 | TTCATGTGTGTGTGTGTTTC |
| 1609 | CCCTGGGCTGGGAGCTCCGA | 2733 | CGCAGTGAGCTATGATCAGC | 3858 | TTTCATGTGTGTGTGTGTTT |
| 1610 | ACCCTGGGCTGGGAGCTCCG | 2734 | CCGCAGTGAGCTATGATCAG | 3859 | GTTTCATGTGTGTGTGTGTT |
| 1611 | GACCCTGGGCTGGGAGCTCC | 2735 | GCCGCAGTGAGCTATGATCA | 3860 | AGTTTCATGTGTGTGTGTGT |
| 1612 | CGACCCTGGGCTGGGAGCTC | 2736 | GGCCGCAGTGAGCTATGATC | 3861 | AAGTTTCATGTGTGTGTGTG |
| 1613 | GCGACCCTGGGCTGGGAGCT | 2737 | AGGCCGCAGTGAGCTATGAT | 3862 | AAAGTTTCATGTGTGTGTGT |
| 1614 | CGCGACCCTGGGCTGGGAGC | 2738 | CAGGCCGCAGTGAGCTATGA | 3863 | GAAAGTTTCATGTGTGTGTG |
| 1615 | GCGCGACCCTGGGCTGGGAG | 2739 | GCAGGCCGCAGTGAGCTATG | 3864 | TGAAAGTTTCATGTGTGTGT |
| 1616 | CGCGCGACCCTGGGCTGGGA | 2740 | TGCAGGCCGCAGTGAGCTAT | 3865 | ATGAAAGTTTCATGTGTGTG |
| 1617 | GCGCGCGACCCTGGGCTGGG | 2741 | TTGCAGGCCGCAGTGAGCTA | 3866 | CATGAAAGTTTCATGTGTGT |
| 1618 | GGCGCGCGACCCTGGGCTGG | 2742 | GTTGCAGGCCGCAGTGAGCT | 3867 | TCATGAAAGTTTCATGTGTG |
| 1619 | GGGCGCGCGACCCTGGGCTG | 2743 | AGTTGCAGGCCGCAGTGAGC | 3868 | TTCATGAAAGTTTCATGTGT |
| 1620 | GGGGCGCGCGACCCTGGGCT | 2744 | GAGTTGCAGGCCGCAGTGAG | 3869 | TTTCATGAAAGTTTCATGTG |
| 1621 | AGGGGCGCGCGACCCTGGGC | 2745 | GGAGTTGCAGGCCGCAGTGA | 3870 | ATTTCATGAAAGTTTCATGT |
| 1622 | GAGGGGCGCGCGACCCTGGG | 2746 | AGGAGTTGCAGGCCGCAGTG | 3871 | CATTTCATGAAAGTTTCATG |
| 1623 | GGAGGGGCGCGCGACCCTGG | 2747 | CAGGAGTTGCAGGCCGCAGT | 3872 | ACATTTCATGAAAGTTTCAT |
| 1624 | CGGAGGGGCGCGCGACCCTG | 2748 | GCAGGAGTTGCAGGCCGCAG | 3873 | AACATTTCATGAAAGTTTCA |
| 1625 | CCGGAGGGGCGCGCGACCCT | 2749 | AGCAGGAGTTGCAGGCCGCA | 3874 | TAACATTTCATGAAAGTTTC |
| 1626 | GCCGGAGGGGCGCGCGACCC | 2750 | GAGCAGGAGTTGCAGGCCGC | 3875 | CTAACATTTCATGAAAGTTT |
| 1627 | AGCCGGAGGGGCGCGCGACC | 2751 | GGAGCAGGAGTTGCAGGCCG | 3876 | CCTAACATTTCATGAAAGTT |
| 1628 | GAGCCGGAGGGGCGCGCGAC | 2752 | GGGAGCAGGAGTTGCAGGCC | 3877 | ACCTAACATTTCATGAAAGT |
| 1629 | GGAGCCGGAGGGGCGCGCGA | 2753 | TGGGAGCAGGAGTTGCAGGC | 3878 | CACCTAACATTTCATGAAAG |
| 1630 | TGGAGCCGGAGGGGCGCGCG | 2754 | TTGGGAGCAGGAGTTGCAGG | 3879 | TCACCTAACATTTCATGAAA |
| 1631 | CTGGAGCCGGAGGGGCGCGC | 2755 | TTTGGGAGCAGGAGTTGCAG | 3880 | TTCACCTAACATTTCATGAA |
| 1632 | CCTGGAGCCGGAGGGGCGCG | 2756 | CTTTGGGAGCAGGAGTTGCA | 3881 | ATTCACCTAACATTTCATGA |
| 1633 | GCCTGGAGCCGGAGGGGCGC | 2757 | GCTTTGGGAGCAGGAGTTGC | 3882 | GATTCACCTAACATTTCATG |
| 1634 | GGCCTGGAGCCGGAGGGGCG | 2758 | CGCTTTGGGAGCAGGAGTTG | 3883 | CGATTCACCTAACATTTCAT |
| 1635 | CGGCCTGGAGCCGGAGGGGC | 2759 | TCGCTTTGGGAGCAGGAGTT | 3884 | TCGATTCACCTAACATTTCA |
| 1636 | GCGGCCTGGAGCCGGAGGGG | 2760 | ATCGCTTTGGGAGCAGGAGT | 3885 | ATCGATTCACCTAACATTTC |
| 1637 | GGCGGCCTGGAGCCGGAGGG | 2761 | AATCGCTTTGGGAGCAGGAG | 3886 | GATCGATTCACCTAACATTT |
| 1638 | CGGCGGCCTGGAGCCGGAGG | 2762 | GAATCGCTTTGGGAGCAGGA | 3887 | TGATCGATTCACCTAACATT |
| 1639 | GCGGCGGCCTGGAGCCGGAG | 2763 | AGAATCGCTTTGGGAGCAGG | 3888 | TTGATCGATTCACCTAACAT |
| 1640 | CGCGGCGGCCTGGAGCCGGA | 2764 | GAGAATCGCTTTGGGAGCAG | 3889 | ATTGATCGATTCACCTAACA |
| 1641 | CCGCGGCGGCCTGGAGCCGG | 2765 | GGAGAATCGCTTTGGGAGCA | 3890 | TATTGATCGATTCACCTAAC |
| 1642 | CCCGCGGCGGCCTGGAGCCG | 2766 | AGGAGAATCGCTTTGGGAGC | 3891 | TTATTGATCGATTCACCTAA |
| 1643 | TCCCGCGGCGGCCTGGAGCC | 2767 | TAGGAGAATCGCTTTGGGAG | 3892 | GTTATTGATCGATTCACCTA |
| 1644 | TTCCCGCGGCGGCCTGGAGC | 2768 | GTAGGAGAATCGCTTTGGGA | 3893 | GGTTATTGATCGATTCACCT |
| 1645 | GTTCCCGCGGCGGCCTGGAG | 2769 | GGTAGGAGAATCGCTTTGGG | 3894 | AGGTTATTGATCGATTCACC |
| 1646 | GGTTCCCGCGGCGGCCTGGA | 2770 | CGGTAGGAGAATCGCTTTGG | 3895 | TAGGTTATTGATCGATTCAC |
| 1647 | TGGTTCCCGCGGCGGCCTGG | 2771 | GCGGTAGGAGAATCGCTTTG | 3896 | GTAGGTTATTGATCGATTCA |
| 1648 | GTGGTTCCCGCGGCGGCCTG | 2772 | TGCGGTAGGAGAATCGCTTT | 3897 | AGTAGGTTATTGATCGATTC |
| 1649 | GGTGGTTCCCGCGGCGGCCT | 2773 | CTGCGGTAGGAGAATCGCTT | 3898 | TAGTAGGTTATTGATCGATT |
| 1650 | GGGTGGTTCCCGCGGCGGCC | 2774 | GCTGCGGTAGGAGAATCGCT | 3899 | TTAGTAGGTTATTGATCGAT |
| 1651 | TGGGTGGTTCCCGCGGCGGC | 2775 | GGCTGCGGTAGGAGAATCGC | 3900 | ATTAGTAGGTTATTGATCGA |
| 1652 | GTGGGTGGTTCCCGCGGCGG | 2776 | GGGCTGCGGTAGGAGAATCG | 3901 | AATTAGTAGGTTATTGATCG |
| 1653 | GGTGGGTGGTTCCCGCGGCG | 2777 | GGGGCTGCGGTAGGAGAATC | 3902 | TAATTAGTAGGTTATTGATC |
| 1654 | TGGTGGGTGGTTCCCGCGGC | 2778 | GGGGGCTGCGGTAGGAGAAT | 3903 | GTAATTAGTAGGTTATTGAT |
| 1655 | GTGGTGGGTGGTTCCCGCGG | 2779 | GGGGGGCTGCGGTAGGAGAA | 3904 | TGTAATTAGTAGGTTATTGA |
| 1656 | GGTGGTGGGTGGTTCCCGCG | 2780 | TGGGGGGCTGCGGTAGGAGA | 3905 | TTGTAATTAGTAGGTTATTG |
| 1657 | TGGTGGTGGGTGGTTCCCGC | 2781 | TTGGGGGGCTGCGGTAGGAG | 3906 | GTTGTAATTAGTAGGTTATT |
| 1658 | GTGGTGGTGGGTGGTTCCCG | 2782 | CTTGGGGGGCTGCGGTAGGA | 3907 | GGTTGTAATTAGTAGGTTAT |
| 1659 | GGTGGTGGTGGGTGGTTCCC | 2783 | CCTTGGGGGGCTGCGGTAGG | 3908 | TGGTTGTAATTAGTAGGTTA |
| 1660 | TGGTGGTGGTGGGTGGTTCC | 2784 | GCCTTGGGGGGCTGCGGTAG | 3909 | GTGGTTGTAATTAGTAGGTT |
| 1661 | CTGGTGGTGGTGGGTGGTTC | 2785 | CGCCTTGGGGGGCTGCGGTA | 3910 | GGTGGTTGTAATTAGTAGGT |
| 1662 | CCTGGTGGTGGTGGGTGGTT | 2786 | GCGCCTTGGGGGGCTGCGGT | 3911 | GGGTGGTTGTAATTAGTAGG |
| 1663 | TCCTGGTGGTGGTGGGTGGT | 2787 | AGCGCCTTGGGGGGCTGCGG | 3912 | TGGGTGGTTGTAATTAGTAG |
| 1664 | CTCCTGGTGGTGGTGGGTGG | 2788 | CAGCGCCTTGGGGGGCTGCG | 3913 | CTGGGTGGTTGTAATTAGTA |
| 1665 | TCTCCTGGTGGTGGTGGGTG | 2789 | CCAGCGCCTTGGGGGGCTGC | 3914 | TCTGGGTGGTTGTAATTAGT |
| 1666 | CTCTCCTGGTGGTGGTGGGT | 2790 | CCCAGCGCCTTGGGGGGCTG | 3915 | TTCTGGGTGGTTGTAATTAG |
| 1667 | CCTCTCCTGGTGGTGGTGGG | 2791 | TCCCAGCGCCTTGGGGGGCT | 3916 | GTTCTGGGTGGTTGTAATTA |
| 1668 | CCCTCTCCTGGTGGTGGTGG | 2792 | ATCCCAGCGCCTTGGGGGGC | 3917 | GGTTCTGGGTGGTTGTAATT |
| 1669 | CCCCTCTCCTGGTGGTGGTG | 2793 | AATCCCAGCGCCTTGGGGGG | 3918 | TGGTTCTGGGTGGTTGTAAT |
| 1670 | TCCCCTCTCCTGGTGGTGGT | 2794 | TAATCCCAGCGCCTTGGGGG | 3919 | CTGGTTCTGGGTGGTTGTAA |
| 1671 | TTCCCCTCTCCTGGTGGTGG | 2795 | GTAATCCCAGCGCCTTGGGG | 3920 | TCTGGTTCTGGGTGGTTGTA |
| 1672 | CTTCCCCTCTCCTGGTGGTG | 2796 | TGTAATCCCAGCGCCTTGGG | 3921 | TTCTGGTTCTGGGTGGTTGT |
| 1673 | TCTTCCCCTCTCCTGGTGGT | 2797 | TTGTAATCCCAGCGCCTTGG | 3922 | TTTCTGGTTCTGGGTGGTTG |
| 1674 | TTCTTCCCCTCTCCTGGTGG | 2798 | TTTGTAATCCCAGCGCCTTG | 3923 | TTTTCTGGTTCTGGGTGGTT |
| 1675 | CTTCTTCCCCTCTCCTGGTG | 2799 | ATTTGTAATCCCAGCGCCTT | 3924 | TTTTTCTGGTTCTGGGTGGT |
| 1676 | GCTTCTTCCCCTCTCCTGGT | 2800 | CATTTGTAATCCCAGCGCCT | 3925 | TTTTTTCTGGTTCTGGGTGG |
| 1677 | GGCTTCTTCCCCTCTCCTGG | 2801 | ACATTTGTAATCCCAGCGCC | 3926 | TTTTTTTCTGGTTCTGGGTG |
| 1678 | TGGCTTCTTCCCCTCTCCTG | 2802 | CACATTTGTAATCCCAGCGC | 3927 | ATTTTTTTCTGGTTCTGGGT |
| 1679 | CTGGCTTCTTCCCCTCTCCT | 2803 | TCACATTTGTAATCCCAGCG | 3928 | TATTTTTTTCTGGTTCTGGG |
| 1680 | GCTGGCTTCTTCCCCTCTCC | 2804 | CTCACATTTGTAATCCCAGC | 3929 | GTATTTTTTTCTGGTTCTGG |
| 1681 | TGCTGGCTTCTTCCCCTCTC | 2805 | GCTCACATTTGTAATCCCAG | 3930 | TGTATTTTTTTCTGGTTCTG |
| 1682 | GTGCTGGCTTCTTCCCCTCT | 2806 | AGCTCACATTTGTAATCCCA | 3931 | CTGTATTTTTTTCTGGTTCT |
| 1683 | GGTGCTGGCTTCTTCCCCTC | 2807 | TAGCTCACATTTGTAATCCC | 3932 | CCTGTATTTTTTTCTGGTTC |
| 1684 | AGGTGCTGGCTTCTTCCCCT | 2808 | GTAGCTCACATTTGTAATCC | 3933 | ACCTGTATTTTTTTCTGGTT |
| 1685 | TAGGTGCTGGCTTCTTCCCC | 2809 | AGTAGCTCACATTTGTAATC | 3934 | TACCTGTATTTTTTTCTGGT |
| 1686 | GTAGGTGCTGGCTTCTTCCC | 2810 | CAGTAGCTCACATTTGTAAT | 3935 | CTACCTGTATTTTTTTCTGG |
| 1687 | GGTAGGTGCTGGCTTCTTCC | 2811 | TCAGTAGCTCACATTTGTAA | 3936 | TCTACCTGTATTTTTTTCTG |
| 1688 | CGGTAGGTGCTGGCTTCTTC | 2812 | CTCAGTAGCTCACATTTGTA | 3937 | TTCTACCTGTATTTTTTTCT |
| 1689 | TCGGTAGGTGCTGGCTTCTT | 2813 | GCTCAGTAGCTCACATTTGT | 3938 | CTTCTACCTGTATTTTTTTC |
| 1690 | GTCGGTAGGTGCTGGCTTCT | 2814 | AGCTCAGTAGCTCACATTTG | 3939 | TCTTCTACCTGTATTTTTTT |
| 1691 | TGTCGGTAGGTGCTGGCTTC | 2815 | CAGCTCAGTAGCTCACATTT | 3940 | TTCTTCTACCTGTATTTTTT |
| 1692 | CTGTCGGTAGGTGCTGGCTT | 2816 | CCAGCTCAGTAGCTCACATT | 3941 | TTTCTTCTACCTGTATTTTT |
| 1693 | CCTGTCGGTAGGTGCTGGCT | 2817 | GCCAGCTCAGTAGCTCACAT | 3942 | TTTTCTTCTACCTGTATTTT |
| 1694 | CCCTGTCGGTAGGTGCTGGC | 2818 | AGCCAGCTCAGTAGCTCACA | 3943 | TTTTTCTTCTACCTGTATTT |
| 1695 | CCCCTGTCGGTAGGTGCTGG | 2819 | GAGCCAGCTCAGTAGCTCAC | 3944 | TTTTTTCTTCTACCTGTATT |
| 1696 | ACCCCTGTCGGTAGGTGCTG | 2820 | CGAGCCAGCTCAGTAGCTCA | 3945 | TTTTTTTCTTCTACCTGTAT |
| 1697 | CACCCCTGTCGGTAGGTGCT | 2821 | GCGAGCCAGCTCAGTAGCTC | 3946 | TTTTTTTTCTTCTACCTGTA |
| 1698 | CCACCCCTGTCGGTAGGTGC | 2822 | AGCGAGCCAGCTCAGTAGCT | 3947 | GTTTTTTTTCTTCTACCTGT |
| 1699 | TCCACCCCTGTCGGTAGGTG | 2823 | GAGCGAGCCAGCTCAGTAGC | 3948 | GGTTTTTTTTCTTCTACCTG |
| 1700 | CTCCACCCCTGTCGGTAGGT | 2824 | GGAGCGAGCCAGCTCAGTAG | 3949 | AGGTTTTTTTTCTTCTACCT |
| 1701 | GCTCCACCCCTGTCGGTAGG | 2825 | AGGAGCGAGCCAGCTCAGTA | 3950 | TAGGTTTTTTTTCTTCTACC |
| 1702 | AGCTCCACCCCTGTCGGTAG | 2826 | TAGGAGCGAGCCAGCTCAGT | 3951 | TTAGGTTTTTTTTCTTCTAC |
| 1703 | CAGCTCCACCCCTGTCGGTA | 2827 | ATAGGAGCGAGCCAGCTCAG | 3952 | TTTAGGTTTTTTTTCTTCTA |
| 1704 | CCAGCTCCACCCCTGTCGGT | 2828 | GATAGGAGCGAGCCAGCTCA | 3953 | GTTTAGGTTTTTTTTCTTCT |
| 1705 | CCCAGCTCCACCCCTGTCGG | 2829 | GGATAGGAGCGAGCCAGCTC | 3954 | TGTTTAGGTTTTTTTTCTTC |
| 1706 | ACCCAGCTCCACCCCTGTCG | 2830 | AGGATAGGAGCGAGCCAGCT | 3955 | CTGTTTAGGTTTTTTTTCTT |
| 1707 | GACCCAGCTCCACCCCTGTC | 2831 | TAGGATAGGAGCGAGCCAGC | 3956 | TCTGTTTAGGTTTTTTTTCT |
| 1708 | TGACCCAGCTCCACCCCTGT | 2832 | ATAGGATAGGAGCGAGCCAG | 3957 | GTCTGTTTAGGTTTTTTTTC |
| 1709 | TTGACCCAGCTCCACCCCTG | 2833 | GATAGGATAGGAGCGAGCCA | 3958 | AGTCTGTTTAGGTTTTTTTT |
| 1710 | CTTGACCCAGCTCCACCCCT | 2834 | GGATAGGATAGGAGCGAGCC | 3959 | CAGTCTGTTTAGGTTTTTTT |
| 1711 | TCTTGACCCAGCTCCACCCC | 2835 | AGGATAGGATAGGAGCGAGC | 3960 | TCAGTCTGTTTAGGTTTTTT |
| 1712 | TTCTTGACCCAGCTCCACCC | 2836 | CAGGATAGGATAGGAGCGAG | 3961 | TTCAGTCTGTTTAGGTTTTT |
| 1713 | ATTCTTGACCCAGCTCCACC | 2837 | GCAGGATAGGATAGGAGCGA | 3962 | TTTCAGTCTGTTTAGGTTTT |
| 1714 | CATTCTTGACCCAGCTCCAC | 2838 | GGCAGGATAGGATAGGAGCG | 3963 | GTTTCAGTCTGTTTAGGTTT |
| 1715 | CCATTCTTGACCCAGCTCCA | 2839 | GGGCAGGATAGGATAGGAGC | 3964 | TGTTTCAGTCTGTTTAGGTT |
| 1716 | ACCATTCTTGACCCAGCTCC | 2840 | AGGGCAGGATAGGATAGGAG | 3965 | TTGTTTCAGTCTGTTTAGGT |
| 1717 | CACCATTCTTGACCCAGCTC | 2841 | CAGGGCAGGATAGGATAGGA | 3966 | TTTGTTTCAGTCTGTTTAGG |
| 1718 | ACACCATTCTTGACCCAGCT | 2842 | ACAGGGCAGGATAGGATAGG | 3967 | ATTTGTTTCAGTCTGTTTAG |
| 1719 | CACACCATTCTTGACCCAGC | 2843 | GACAGGGCAGGATAGGATAG | 3968 | TATTTGTTTCAGTCTGTTTA |
| 1720 | CCACACCATTCTTGACCCAG | 2844 | AGACAGGGCAGGATAGGATA | 3969 | ATATTTGTTTCAGTCTGTTT |
| 1721 | ACCACACCATTCTTGACCCA | 2845 | AAGACAGGGCAGGATAGGAT | 3970 | GATATTTGTTTCAGTCTGTT |
| 1722 | GACCACACCATTCTTGACCC | 2846 | CAAGACAGGGCAGGATAGGA | 3971 | TGATATTTGTTTCAGTCTGT |
| 1723 | GGACCACACCATTCTTGACC | 2847 | ACAAGACAGGGCAGGATAGG | 3972 | GTGATATTTGTTTCAGTCTG |
| 1724 | GGGACCACACCATTCTTGAC | 2848 | GACAAGACAGGGCAGGATAG | 3973 | TGTGATATTTGTTTCAGTCT |
| 1725 | AGGGACCACACCATTCTTGA | 2849 | GGACAAGACAGGGCAGGATA | 3974 | TTGTGATATTTGTTTCAGTC |
| 1726 | CAGGGACCACACCATTCTTG | 2850 | AGGACAAGACAGGGCAGGAT | 3975 | TTTGTGATATTTGTTTCAGT |
| 1727 | GCAGGGACCACACCATTCTT | 2851 | CAGGACAAGACAGGGCAGGA | 3976 | CTTTGTGATATTTGTTTCAG |
| 1728 | AGCAGGGACCACACCATTCT | 2852 | ACAGGACAAGACAGGGCAGG | 3977 | ACTTTGTGATATTTGTTTCA |
| 1729 | AAGCAGGGACCACACCATTC | 2853 | GACAGGACAAGACAGGGCAG | 3978 | GACTTTGTGATATTTGTTTC |
| 1730 | AAAGCAGGGACCACACCATT | 2854 | GGACAGGACAAGACAGGGCA | 3979 | AGACTTTGTGATATTTGTTT |
| 1731 | CAAAGCAGGGACCACACCAT | 2855 | AGGACAGGACAAGACAGGGC | 3980 | TAGACTTTGTGATATTTGTT |
| 1732 | CCAAAGCAGGGACCACACCA | 2856 | CAGGACAGGACAAGACAGGG | 3981 | TTAGACTTTGTGATATTTGT |
| 1733 | CCCAAAGCAGGGACCACACC | 2857 | ACAGGACAGGACAAGACAGG | 3982 | ATTAGACTTTGTGATATTTG |
| 1734 | CCCCAAAGCAGGGACCACAC | 2858 | GACAGGACAGGACAAGACAG | 3983 | GATTAGACTTTGTGATATTT |
| 1735 | CCCCCAAAGCAGGGACCACA | 2859 | GGACAGGACAGGACAAGACA | 3984 | CGATTAGACTTTGTGATATT |
| 1736 | TCCCCCAAAGCAGGGACCAC | 2860 | AGGACAGGACAGGACAAGAC | 3985 | ACGATTAGACTTTGTGATAT |
| 1737 | TTCCCCCAAAGCAGGGACCA | 2861 | CAGGACAGGACAGGACAAGA | 3986 | GACGATTAGACTTTGTGATA |
| 1738 | ATTCCCCCAAAGCAGGGACC | 2862 | GCAGGACAGGACAGGACAAG | 3987 | TGACGATTAGACTTTGTGAT |
| 1739 | CATTCCCCCAAAGCAGGGAC | 2863 | GGCAGGACAGGACAGGACAA | 3988 | TTGACGATTAGACTTTGTGA |
| 1740 | GCATTCCCCCAAAGCAGGGA | 2864 | GGGCAGGACAGGACAGGACA | 3989 | TTTGACGATTAGACTTTGTG |
| 1741 | AGCATTCCCCCAAAGCAGGG | 2865 | AGGGCAGGACAGGACAGGAC | 3990 | CTTTGACGATTAGACTTTGT |
| 1742 | CAGCATTCCCCCAAAGCAGG | 2866 | TAGGGCAGGACAGGACAGGA | 3991 | GCTTTGACGATTAGACTTTG |
| 1743 | CCAGCATTCCCCCAAAGCAG | 2867 | ATAGGGCAGGACAGGACAGG | 3992 | GGCTTTGACGATTAGACTTT |
| 1744 | CCCAGCATTCCCCCAAAGCA | 2868 | AATAGGGCAGGACAGGACAG | 3993 | CGGCTTTGACGATTAGACTT |
| 1745 | CCCCAGCATTCCCCCAAAGC | 2869 | GAATAGGGCAGGACAGGACA | 3994 | ACGGCTTTGACGATTAGACT |
| 1746 | TCCCCAGCATTCCCCCAAAG | 2870 | AGAATAGGGCAGGACAGGAC | 3995 | CACGGCTTTGACGATTAGAC |
| 1747 | CTCCCCAGCATTCCCCCAAA | 2871 | CAGAATAGGGCAGGACAGGA | 3996 | TCACGGCTTTGACGATTAGA |
| 1748 | CCTCCCCAGCATTCCCCCAA | 2872 | GCAGAATAGGGCAGGACAGG | 3997 | ATCACGGCTTTGACGATTAG |
| 1749 | ACCTCCCCAGCATTCCCCCA | 2873 | GGCAGAATAGGGCAGGACAG | 3998 | AATCACGGCTTTGACGATTA |
| 1750 | TACCTCCCCAGCATTCCCCC | 2874 | GGGCAGAATAGGGCAGGACA | 3999 | GAATCACGGCTTTGACGATT |
| 1751 | CTACCTCCCCAGCATTCCCC | 2875 | AGGGCAGAATAGGGCAGGAC | 4000 | AGAATCACGGCTTTGACGAT |
| 1752 | TCTACCTCCCCAGCATTCCC | 2876 | TAGGGCAGAATAGGGCAGGA | 4001 | AAGAATCACGGCTTTGACGA |
| 1753 | TTCTACCTCCCCAGCATTCC | 2877 | ATAGGGCAGAATAGGGCAGG | 4002 | CAAGAATCACGGCTTTGACG |
| 1754 | TTTCTACCTCCCCAGCATTC | 2878 | AATAGGGCAGAATAGGGCAG | 4003 | TCAAGAATCACGGCTTTGAC |
| 1755 | CTTTCTACCTCCCCAGCATT | 2879 | GAATAGGGCAGAATAGGGCA | 4004 | CTCAAGAATCACGGCTTTGA |
| 1756 | GCTTTCTACCTCCCCAGCAT | 2880 | AGAATAGGGCAGAATAGGGC | 4005 | GCTCAAGAATCACGGCTTTG |
| 1757 | GGCTTTCTACCTCCCCAGCA | 2881 | GAGAATAGGGCAGAATAGGG | 4006 | TGCTCAAGAATCACGGCTTT |
| 1758 | GGGCTTTCTACCTCCCCAGC | 2882 | GGAGAATAGGGCAGAATAGG | 4007 | CTGCTCAAGAATCACGGCTT |
| 1759 | GGGGCTTTCTACCTCCCCAG | 2883 | TGGAGAATAGGGCAGAATAG | 4008 | GCTGCTCAAGAATCACGGCT |
| 1760 | AGGGGCTTTCTACCTCCCCA | 2884 | TTGGAGAATAGGGCAGAATA | 4009 | CGCTGCTCAAGAATCACGGC |
| 1761 | AAGGGGCTTTCTACCTCCCC | 2885 | TTTGGAGAATAGGGCAGAAT | 4010 | CCGCTGCTCAAGAATCACGG |
| 1762 | GAAGGGGCTTTCTACCTCCC | 2886 | GTTTGGAGAATAGGGCAGAA | 4011 | GCCGCTGCTCAAGAATCACG |
| 1763 | AGAAGGGGCTTTCTACCTCC | 2887 | AGTTTGGAGAATAGGGCAGA | 4012 | TGCCGCTGCTCAAGAATCAC |
| 1764 | TAGAAGGGGCTTTCTACCTC | 2888 | GAGTTTGGAGAATAGGGCAG | 4013 | TTGCCGCTGCTCAAGAATCA |
| 1765 | TTAGAAGGGGCTTTCTACCT | 2889 | CGAGTTTGGAGAATAGGGCA | 4014 | ATTGCCGCTGCTCAAGAATC |
| 1766 | GTTAGAAGGGGCTTTCTACC | 2890 | CCGAGTTTGGAGAATAGGGC | 4015 | AATTGCCGCTGCTCAAGAAT |
| 1767 | CGTTAGAAGGGGCTTTCTAC | 2891 | ACCGAGTTTGGAGAATAGGG | 4016 | AAATTGCCGCTGCTCAAGAA |
| 1768 | CCGTTAGAAGGGGCTTTCTA | 2892 | AACCGAGTTTGGAGAATAGG | 4017 | AAAATTGCCGCTGCTCAAGA |
| 1769 | CCCGTTAGAAGGGGCTTTCT | 2893 | CAACCGAGTTTGGAGAATAG | 4018 | CAAAATTGCCGCTGCTCAAG |
| 1770 | CCCCGTTAGAAGGGGCTTTC | 2894 | TCAACCGAGTTTGGAGAATA | 4019 | GCAAAATTGCCGCTGCTCAA |
| 1771 | GCCCCGTTAGAAGGGGCTTT | 2895 | GTCAACCGAGTTTGGAGAAT | 4020 | GGCAAAATTGCCGCTGCTCA |
| 1772 | CGCCCCGTTAGAAGGGGCTT | 2896 | TGTCAACCGAGTTTGGAGAA | 4021 | CGGCAAAATTGCCGCTGCTC |
| 1773 | ACGCCCCGTTAGAAGGGGCT | 2897 | ATGTCAACCGAGTTTGGAGA | 4022 | CCGGCAAAATTGCCGCTGCT |
| 1774 | GACGCCCCGTTAGAAGGGGC | 2898 | CATGTCAACCGAGTTTGGAG | 4023 | GCCGGCAAAATTGCCGCTGC |
| 1775 | TGACGCCCCGTTAGAAGGGG | 2899 | GCATGTCAACCGAGTTTGGA | 4024 | GGCCGGCAAAATTGCCGCTG |
| 1776 | GTGACGCCCCGTTAGAAGGG | 2900 | AGCATGTCAACCGAGTTTGG | 4025 | TGGCCGGCAAAATTGCCGCT |
| 1777 | AGTGACGCCCCGTTAGAAGG | 2901 | TAGCATGTCAACCGAGTTTG | 4026 | CTGGCCGGCAAAATTGCCGC |
| 1778 | CAGTGACGCCCCGTTAGAAG | 2902 | CTAGCATGTCAACCGAGTTT | 4027 | CCTGGCCGGCAAAATTGCCG |
| 1779 | GCAGTGACGCCCCGTTAGAA | 2903 | CCTAGCATGTCAACCGAGTT | 4028 | CCCTGGCCGGCAAAATTGCC |
| 1780 | TGCAGTGACGCCCCGTTAGA | 2904 | GCCTAGCATGTCAACCGAGT | 4029 | TCCCTGGCCGGCAAAATTGC |
| 1781 | TTGCAGTGACGCCCCGTTAG | 2905 | TGCCTAGCATGTCAACCGAG | 4030 | GTCCCTGGCCGGCAAAATTG |
| 1782 | ATTGCAGTGACGCCCCGTTA | 2906 | CTGCCTAGCATGTCAACCGA | 4031 | TGTCCCTGGCCGGCAAAATT |
| 1783 | AATTGCAGTGACGCCCCGTT | 2907 | CCTGCCTAGCATGTCAACCG | 4032 | ATGTCCCTGGCCGGCAAAAT |
| 1784 | TAATTGCAGTGACGCCCCGT | 2908 | GCCTGCCTAGCATGTCAACC | 4033 | AATGTCCCTGGCCGGCAAAA |
| 1785 | GTAATTGCAGTGACGCCCCG | 2909 | GGCCTGCCTAGCATGTCAAC | 4034 | AAATGTCCCTGGCCGGCAAA |
| 1786 | AGTAATTGCAGTGACGCCCC | 2910 | GGGCCTGCCTAGCATGTCAA | 4035 | TAAATGTCCCTGGCCGGCAA |
| 1787 | CAGTAATTGCAGTGACGCCC | 2911 | GGGGCCTGCCTAGCATGTCA | 4036 | CTAAATGTCCCTGGCCGGCA |
| 1788 | GCAGTAATTGCAGTGACGCC | 2912 | TGGGGCCTGCCTAGCATGTC | 4037 | CCTAAATGTCCCTGGCCGGC |
| 1789 | AGCAGTAATTGCAGTGACGC | 2913 | CTGGGGCCTGCCTAGCATGT | 4038 | TCCTAAATGTCCCTGGCCGG |
| 1790 | AAGCAGTAATTGCAGTGACG | 2914 | TCTGGGGCCTGCCTAGCATG | 4039 | CTCCTAAATGTCCCTGGCCG |
| 1791 | GAAGCAGTAATTGCAGTGAC | 2915 | CTCTGGGGCCTGCCTAGCAT | 4040 | ACTCCTAAATGTCCCTGGCC |
| 1792 | GGAAGCAGTAATTGCAGTGA | 2916 | ACTCTGGGGCCTGCCTAGCA | 4041 | CACTCCTAAATGTCCCTGGC |
| 1793 | AGGAAGCAGTAATTGCAGTG | 2917 | CACTCTGGGGCCTGCCTAGC | 4042 | ACACTCCTAAATGTCCCTGG |
| 1794 | GAGGAAGCAGTAATTGCAGT | 2918 | TCACTCTGGGGCCTGCCTAG | 4043 | GACACTCCTAAATGTCCCTG |
| 1795 | AGAGGAAGCAGTAATTGCAG | 2919 | CTCACTCTGGGGCCTGCCTA | 4044 | AGACACTCCTAAATGTCCCT |
| 1796 | AAGAGGAAGCAGTAATTGCA | 2920 | ACTCACTCTGGGGCCTGCCT | 4045 | CAGACACTCCTAAATGTCCC |
| 1797 | AAAGAGGAAGCAGTAATTGC | 2921 | AACTCACTCTGGGGCCTGCC | 4046 | CCAGACACTCCTAAATGTCC |
| 1798 | GAAAGAGGAAGCAGTAATTG | 2922 | CAACTCACTCTGGGGCCTGC | 4047 | TCCAGACACTCCTAAATGTC |
| 1799 | GGAAAGAGGAAGCAGTAATT | 2923 | TCAACTCACTCTGGGGCCTG | 4048 | CTCCAGACACTCCTAAATGT |
| 1800 | GGGAAAGAGGAAGCAGTAAT | 2924 | TTCAACTCACTCTGGGGCCT | 4049 | TCTCCAGACACTCCTAAATG |
| 1801 | TGGGAAAGAGGAAGCAGTAA | 2925 | CTTCAACTCACTCTGGGGCC | 4050 | GTCTCCAGACACTCCTAAAT |
| 1802 | ATGGGAAAGAGGAAGCAGTA | 2926 | CCTTCAACTCACTCTGGGGC | 4051 | TGTCTCCAGACACTCCTAAA |
| 1803 | TATGGGAAAGAGGAAGCAGT | 2927 | TCCTTCAACTCACTCTGGGG | 4052 | TTGTCTCCAGACACTCCTAA |
| 1804 | TTATGGGAAAGAGGAAGCAG | 2928 | ATCCTTCAACTCACTCTGGG | 4053 | ATTGTCTCCAGACACTCCTA |
| 1805 | TTTATGGGAAAGAGGAAGCA | 2929 | CATCCTTCAACTCACTCTGG | 4054 | GATTGTCTCCAGACACTCCT |
| 1806 | TTTTATGGGAAAGAGGAAGC | 2930 | CCATCCTTCAACTCACTCTG | 4055 | AGATTGTCTCCAGACACTCC |
| 1807 | GTTTTATGGGAAAGAGGAAG | 2931 | ACCATCCTTCAACTCACTCT | 4056 | CAGATTGTCTCCAGACACTC |
| 1808 | AGTTTTATGGGAAAGAGGAA | 2932 | AACCATCCTTCAACTCACTC | 4057 | CCAGATTGTCTCCAGACACT |
| 1809 | GAGTTTTATGGGAAAGAGGA | 2933 | AAACCATCCTTCAACTCACT | 4058 | CCCAGATTGTCTCCAGACAC |
| 1810 | GGAGTTTTATGGGAAAGAGG | 2934 | GAAACCATCCTTCAACTCAC | 4059 | ACCCAGATTGTCTCCAGACA |
| 1811 | GGGAGTTTTATGGGAAAGAG | 2935 | GGAAACCATCCTTCAACTCA | 4060 | AACCCAGATTGTCTCCAGAC |
| 1812 | GGGGAGTTTTATGGGAAAGA | 2936 | TGGAAACCATCCTTCAACTC | 4061 | CAACCCAGATTGTCTCCAGA |
| 1813 | GGGGGAGTTTTATGGGAAAG | 2937 | CTGGAAACCATCCTTCAACT | 4062 | ACAACCCAGATTGTCTCCAG |
| 1814 | AGGGGGAGTTTTATGGGAAA | 2938 | CCTGGAAACCATCCTTCAAC | 4063 | GACAACCCAGATTGTCTCCA |
| 1815 | TAGGGGGAGTTTTATGGGAA | 2939 | TCCTGGAAACCATCCTTCAA | 4064 | TGACAACCCAGATTGTCTCC |
| 1816 | CTAGGGGGAGTTTTATGGGA | 2940 | GTCCTGGAAACCATCCTTCA | 4065 | GTGACAACCCAGATTGTCTC |
| 1817 | ACTAGGGGGAGTTTTATGGG | 2941 | TGTCCTGGAAACCATCCTTC | 4066 | TGTGACAACCCAGATTGTCT |
| 1818 | CACTAGGGGGAGTTTTATGG | 2942 | TTGTCCTGGAAACCATCCTT | 4067 | TTGTGACAACCCAGATTGTC |
| 1819 | ACACTAGGGGGAGTTTTATG | 2943 | TTTGTCCTGGAAACCATCCT | 4068 | GTTGTGACAACCCAGATTGT |
| 1820 | TACACTAGGGGGAGTTTTAT | 2944 | CTTTGTCCTGGAAACCATCC | 4069 | AGTTGTGACAACCCAGATTG |
| 1821 | ATACACTAGGGGGAGTTTTA | 2945 | TCTTTGTCCTGGAAACCATC | 4070 | GAGTTGTGACAACCCAGATT |
| 1822 | GATACACTAGGGGGAGTTTT | 2946 | ATCTTTGTCCTGGAAACCAT | 4071 | TGAGTTGTGACAACCCAGAT |
| 1823 | TGATACACTAGGGGGAGTTT | 2947 | TATCTTTGTCCTGGAAACCA | 4072 | CTGAGTTGTGACAACCCAGA |
| 1824 | CTGATACACTAGGGGGAGTT | 2948 | TTATCTTTGTCCTGGAAACC | 4073 | CCTGAGTTGTGACAACCCAG |
| 1825 | TCTGATACACTAGGGGGAGT | 2949 | TTTATCTTTGTCCTGGAAAC | 4074 | CCCTGAGTTGTGACAACCCA |
| 1826 | TTCTGATACACTAGGGGGAG | 2950 | GTTTATCTTTGTCCTGGAAA | 4075 | ACCCTGAGTTGTGACAACCC |
| 1827 | GTTCTGATACACTAGGGGGA | 2951 | TGTTTATCTTTGTCCTGGAA | 4076 | CACCCTGAGTTGTGACAACC |
| 1828 | GGTTCTGATACACTAGGGGG | 2952 | CTGTTTATCTTTGTCCTGGA | 4077 | CCACCCTGAGTTGTGACAAC |
| 1829 | GGGTTCTGATACACTAGGGG | 2953 | GCTGTTTATCTTTGTCCTGG | 4078 | TCCACCCTGAGTTGTGACAA |
| 1830 | GGGGTTCTGATACACTAGGG | 2954 | GGCTGTTTATCTTTGTCCTG | 4079 | CTCCACCCTGAGTTGTGACA |
| 1831 | GGGGGTTCTGATACACTAGG | 2955 | GGGCTGTTTATCTTTGTCCT | 4080 | CCTCCACCCTGAGTTGTGAC |
| 1832 | TGGGGGTTCTGATACACTAG | 2956 | GGGGCTGTTTATCTTTGTCC | 4081 | CCCTCCACCCTGAGTTGTGA |
| 1833 | TTGGGGGTTCTGATACACTA | 2957 | TGGGGCTGTTTATCTTTGTC | 4082 | TCCCTCCACCCTGAGTTGTG |
| 1834 | CTTGGGGGTTCTGATACACT | 2958 | TTGGGGCTGTTTATCTTTGT | 4083 | GTCCCTCCACCCTGAGTTGT |
| 1835 | CCTTGGGGGTTCTGATACAC | 2959 | TTTGGGGCTGTTTATCTTTG | 4084 | TGTCCCTCCACCCTGAGTTG |
| 1836 | TCCTTGGGGGTTCTGATACA | 2960 | CTTTGGGGCTGTTTATCTTT | 4085 | GTGTCCCTCCACCCTGAGTT |
| 1837 | CTCCTTGGGGGTTCTGATAC | 2961 | GCTTTGGGGCTGTTTATCTT | 4086 | AGTGTCCCTCCACCCTGAGT |
| 1838 | ACTCCTTGGGGGTTCTGATA | 2962 | GGCTTTGGGGCTGTTTATCT | 4087 | CAGTGTCCCTCCACCCTGAG |
| 1839 | AACTCCTTGGGGGTTCTGAT | 2963 | GGGCTTTGGGGCTGTTTATC | 4088 | CCAGTGTCCCTCCACCCTGA |
| 1840 | AAACTCCTTGGGGGTTCTGA | 2964 | AGGGCTTTGGGGCTGTTTAT | 4089 | GCCAGTGTCCCTCCACCCTG |
| 1841 | GAAACTCCTTGGGGGTTCTG | 2965 | AAGGGCTTTGGGGCTGTTTA | 4090 | TGCCAGTGTCCCTCCACCCT |
| 1842 | TGAAACTCCTTGGGGGTTCT | 2966 | AAAGGGCTTTGGGGCTGTTT | 4091 | ATGCCAGTGTCCCTCCACCC |
| 1843 | CTGAAACTCCTTGGGGGTTC | 2967 | GAAAGGGCTTTGGGGCTGTT | 4092 | GATGCCAGTGTCCCTCCACC |
| 1844 | ACTGAAACTCCTTGGGGGTT | 2968 | GGAAAGGGCTTTGGGGCTGT | 4093 | AGATGCCAGTGTCCCTCCAC |
| 1845 | TACTGAAACTCCTTGGGGGT | 2969 | AGGAAAGGGCTTTGGGGCTG | 4094 | CAGATGCCAGTGTCCCTCCA |
| 1846 | TTACTGAAACTCCTTGGGGG | 2970 | GAGGAAAGGGCTTTGGGGCT | 4095 | CCAGATGCCAGTGTCCCTCC |
| 1847 | CTTACTGAAACTCCTTGGGG | 2971 | TGAGGAAAGGGCTTTGGGGC | 4096 | ACCAGATGCCAGTGTCCCTC |
| 1848 | GCTTACTGAAACTCCTTGGG | 2972 | TTGAGGAAAGGGCTTTGGGG | 4097 | TACCAGATGCCAGTGTCCCT |
| 1849 | CGCTTACTGAAACTCCTTGG | 2973 | CTTGAGGAAAGGGCTTTGGG | 4098 | CTACCAGATGCCAGTGTCCC |
| 1850 | CCGCTTACTGAAACTCCTTG | 2974 | CCTTGAGGAAAGGGCTTTGG | 4099 | CCTACCAGATGCCAGTGTCC |
| 1851 | ACCGCTTACTGAAACTCCTT | 2975 | ACCTTGAGGAAAGGGCTTTG | 4100 | ACCTACCAGATGCCAGTGTC |
| 1852 | AACCGCTTACTGAAACTCCT | 2976 | CACCTTGAGGAAAGGGCTTT | 4101 | TACCTACCAGATGCCAGTGT |
| 1853 | GAACCGCTTACTGAAACTCC | 2977 | GCACCTTGAGGAAAGGGCTT | 4102 | TTACCTACCAGATGCCAGTG |
| 1854 | AGAACCGCTTACTGAAACTC | 2978 | AGCACCTTGAGGAAAGGGCT | 4103 | CTTACCTACCAGATGCCAGT |
| 1855 | AAGAACCGCTTACTGAAACT | 2979 | GAGCACCTTGAGGAAAGGGC | 4104 | CCTTACCTACCAGATGCCAG |
| 1856 | GAAGAACCGCTTACTGAAAC | 2980 | TGAGCACCTTGAGGAAAGGG | 4105 | CCCTTACCTACCAGATGCCA |
| 1857 | AGAAGAACCGCTTACTGAAA | 2981 | CTGAGCACCTTGAGGAAAGG | 4106 | GCCCTTACCTACCAGATGCC |
| 1858 | CAGAAGAACCGCTTACTGAA | 2982 | GCTGAGCACCTTGAGGAAAG | 4107 | GGCCCTTACCTACCAGATGC |
| 1859 | ACAGAAGAACCGCTTACTGA | 2983 | TGCTGAGCACCTTGAGGAAA | 4108 | TGGCCCTTACCTACCAGATG |
| 1860 | AACAGAAGAACCGCTTACTG | 2984 | CTGCTGAGCACCTTGAGGAA | 4109 | CTGGCCCTTACCTACCAGAT |
| 1861 | CAACAGAAGAACCGCTTACT | 2985 | CCTGCTGAGCACCTTGAGGA | 4110 | GCTGGCCCTTACCTACCAGA |
| 1862 | ACAACAGAAGAACCGCTTAC | 2986 | TCCTGCTGAGCACCTTGAGG | 4111 | TGCTGGCCCTTACCTACCAG |
| 1863 | GACAACAGAAGAACCGCTTA | 2987 | GTCCTGCTGAGCACCTTGAG | 4112 | TTGCTGGCCCTTACCTACCA |
| 1864 | AGACAACAGAAGAACCGCTT | 2988 | TGTCCTGCTGAGCACCTTGA | 4113 | ATTGCTGGCCCTTACCTACC |
| 1865 | GAGACAACAGAAGAACCGCT | 2989 | CTGTCCTGCTGAGCACCTTG | 4114 | GATTGCTGGCCCTTACCTAC |
| 1866 | GGAGACAACAGAAGAACCGC | 2990 | CCTGTCCTGCTGAGCACCTT | 4115 | GGATTGCTGGCCCTTACCTA |
| 1867 | CGGAGACAACAGAAGAACCG | 2991 | CCCTGTCCTGCTGAGCACCT | 4116 | GGGATTGCTGGCCCTTACCT |
| 1868 | CCGGAGACAACAGAAGAACC | 2992 | TCCCTGTCCTGCTGAGCACC | 4117 | TGGGATTGCTGGCCCTTACC |
| 1869 | GCCGGAGACAACAGAAGAAC | 2993 | CTCCCTGTCCTGCTGAGCAC | 4118 | GTGGGATTGCTGGCCCTTAC |
| 1870 | AGCCGGAGACAACAGAAGAA | 2994 | GCTCCCTGTCCTGCTGAGCA | 4119 | AGTGGGATTGCTGGCCCTTA |
| 1871 | CAGCCGGAGACAACAGAAGA | 2995 | TGCTCCCTGTCCTGCTGAGC | 4120 | TAGTGGGATTGCTGGCCCTT |
| 1872 | TCAGCCGGAGACAACAGAAG | 2996 | CTGCTCCCTGTCCTGCTGAG | 4121 | TTAGTGGGATTGCTGGCCCT |
| 1873 | CTCAGCCGGAGACAACAGAA | 2997 | CCTGCTCCCTGTCCTGCTGA | 4122 | TTTAGTGGGATTGCTGGCCC |
| 1874 | TCTCAGCCGGAGACAACAGA | 2998 | CCCTGCTCCCTGTCCTGCTG | 4123 | GTTTAGTGGGATTGCTGGCC |
| 1875 | GTCTCAGCCGGAGACAACAG | 2999 | TCCCTGCTCCCTGTCCTGCT | 4124 | TGTTTAGTGGGATTGCTGGC |
| 1876 | AGTCTCAGCCGGAGACAACA | 3000 | ATCCCTGCTCCCTGTCCTGC | 4125 | ATGTTTAGTGGGATTGCTGG |
| 1877 | GAGTCTCAGCCGGAGACAAC | 3001 | AATCCCTGCTCCCTGTCCTG | 4126 | GATGTTTAGTGGGATTGCTG |
| 1878 | GGAGTCTCAGCCGGAGACAA | 3002 | CAATCCCTGCTCCCTGTCCT | 4127 | TGATGTTTAGTGGGATTGCT |
| 1879 | TGGAGTCTCAGCCGGAGACA | 3003 | CCAATCCCTGCTCCCTGTCC | 4128 | GTGATGTTTAGTGGGATTGC |
| 1880 | CTGGAGTCTCAGCCGGAGAC | 3004 | ACCAATCCCTGCTCCCTGTC | 4129 | TGTGATGTTTAGTGGGATTG |
| 1881 | CCTGGAGTCTCAGCCGGAGA | 3005 | CACCAATCCCTGCTCCCTGT | 4130 | GTGTGATGTTTAGTGGGATT |
| 1882 | CCCTGGAGTCTCAGCCGGAG | 3006 | CCACCAATCCCTGCTCCCTG | 4131 | CGTGTGATGTTTAGTGGGAT |
| 1883 | CCCCTGGAGTCTCAGCCGGA | 3007 | CCCACCAATCCCTGCTCCCT | 4132 | TCGTGTGATGTTTAGTGGGA |
| 1884 | TCCCCTGGAGTCTCAGCCGG | 3008 | TCCCACCAATCCCTGCTCCC | 4133 | GTCGTGTGATGTTTAGTGGG |
| 1885 | TTCCCCTGGAGTCTCAGCCG | 3009 | CTCCCACCAATCCCTGCTCC | 4134 | TGTCGTGTGATGTTTAGTGG |
| 1886 | GTTCCCCTGGAGTCTCAGCC | 3010 | TCTCCCACCAATCCCTGCTC | 4135 | GTGTCGTGTGATGTTTAGTG |
| 1887 | GGTTCCCCTGGAGTCTCAGC | 3011 | GTCTCCCACCAATCCCTGCT | 4136 | TGTGTCGTGTGATGTTTAGT |
| 1888 | AGGTTCCCCTGGAGTCTCAG | 3012 | TGTCTCCCACCAATCCCTGC | 4137 | GTGTGTCGTGTGATGTTTAG |
| 1889 | GAGGTTCCCCTGGAGTCTCA | 3013 | CTGTCTCCCACCAATCCCTG | 4138 | TGTGTGTCGTGTGATGTTTA |
| 1890 | TGAGGTTCCCCTGGAGTCTC | 3014 | ACTGTCTCCCACCAATCCCT | 4139 | CTGTGTGTCGTGTGATGTTT |
| 1891 | TTGAGGTTCCCCTGGAGTCT | 3015 | GACTGTCTCCCACCAATCCC | 4140 | TCTGTGTGTCGTGTGATGTT |
| 1892 | CTTGAGGTTCCCCTGGAGTC | 3016 | AGACTGTCTCCCACCAATCC | 4141 | TTCTGTGTGTCGTGTGATGT |
| 1893 | GCTTGAGGTTCCCCTGGAGT | 3017 | GAGACTGTCTCCCACCAATC | 4142 | GTTCTGTGTGTCGTGTGATG |
| 1894 | AGCTTGAGGTTCCCCTGGAG | 3018 | TGAGACTGTCTCCCACCAAT | 4143 | TGTTCTGTGTGTCGTGTGAT |
| 1895 | GAGCTTGAGGTTCCCCTGGA | 3019 | CTGAGACTGTCTCCCACCAA | 4144 | TTGTTCTGTGTGTCGTGTGA |
| 1896 | TGAGCTTGAGGTTCCCCTGG | 3020 | CCTGAGACTGTCTCCCACCA | 4145 | ATTGTTCTGTGTGTCGTGTG |
| 1897 | GTGAGCTTGAGGTTCCCCTG | 3021 | GCCTGAGACTGTCTCCCACC | 4146 | GATTGTTCTGTGTGTCGTGT |
| 1898 | TGTGAGCTTGAGGTTCCCCT | 3022 | AGCCTGAGACTGTCTCCCAC | 4147 | GGATTGTTCTGTGTGTCGTG |
| 1899 | ATGTGAGCTTGAGGTTCCCC | 3023 | CAGCCTGAGACTGTCTCCCA | 4148 | GGGATTGTTCTGTGTGTCGT |
| 1900 | CATGTGAGCTTGAGGTTCCC | 3024 | TCAGCCTGAGACTGTCTCCC | 4149 | GGGGATTGTTCTGTGTGTCG |
| 1901 | CCATGTGAGCTTGAGGTTCC | 3025 | TTCAGCCTGAGACTGTCTCC | 4150 | GGGGGATTGTTCTGTGTGTC |
| 1902 | GCCATGTGAGCTTGAGGTTC | 3026 | ATTCAGCCTGAGACTGTCTC | 4151 | TGGGGGATTGTTCTGTGTGT |
| 1903 | GGCCATGTGAGCTTGAGGTT | 3027 | GATTCAGCCTGAGACTGTCT | 4152 | GTGGGGGATTGTTCTGTGTG |
| 1904 | GGGCCATGTGAGCTTGAGGT | 3028 | AGATTCAGCCTGAGACTGTC | 4153 | TGTGGGGGATTGTTCTGTGT |
| 1905 | AGGGCCATGTGAGCTTGAGG | 3029 | TAGATTCAGCCTGAGACTGT | 4154 | TTGTGGGGGATTGTTCTGTG |
| 1906 | CAGGGCCATGTGAGCTTGAG | 3030 | TTAGATTCAGCCTGAGACTG | 4155 | GTTGTGGGGGATTGTTCTGT |
| 1907 | CCAGGGCCATGTGAGCTTGA | 3031 | ATTAGATTCAGCCTGAGACT | 4156 | TGTTGTGGGGGATTGTTCTG |
| 1908 | GCCAGGGCCATGTGAGCTTG | 3032 | AATTAGATTCAGCCTGAGAC | 4157 | TTGTTGTGGGGGATTGTTCT |
| 1909 | CGCCAGGGCCATGTGAGCTT | 3033 | AAATTAGATTCAGCCTGAGA | 4158 | TTTGTTGTGGGGGATTGTTC |
| 1910 | CCGCCAGGGCCATGTGAGCT | 3034 | TAAATTAGATTCAGCCTGAG | 4159 | CTTTGTTGTGGGGGATTGTT |
| 1911 | CCCGCCAGGGCCATGTGAGC | 3035 | TTAAATTAGATTCAGCCTGA | 4160 | TCTTTGTTGTGGGGGATTGT |
| 1912 | GCCCGCCAGGGCCATGTGAG | 3036 | CTTAAATTAGATTCAGCCTG | 4161 | TTCTTTGTTGTGGGGGATTG |
| 1913 | GGCCCGCCAGGGCCATGTGA | 3037 | TCTTAAATTAGATTCAGCCT | 4162 | CTTCTTTGTTGTGGGGGATT |
| 1914 | GGGCCCGCCAGGGCCATGTG | 3038 | ATCTTAAATTAGATTCAGCC | 4163 | ACTTCTTTGTTGTGGGGGAT |
| 1915 | GGGGCCCGCCAGGGCCATGT | 3039 | TATCTTAAATTAGATTCAGC | 4164 | TACTTCTTTGTTGTGGGGGA |
| 1916 | AGGGGCCCGCCAGGGCCATG | 3040 | GTATCTTAAATTAGATTCAG | 4165 | ATACTTCTTTGTTGTGGGGG |
| 1917 | CAGGGGCCCGCCAGGGCCAT | 3041 | TGTATCTTAAATTAGATTCA | 4166 | GATACTTCTTTGTTGTGGGG |
| 1918 | CCAGGGGCCCGCCAGGGCCA | 3042 | TTGTATCTTAAATTAGATTC | 4167 | GGATACTTCTTTGTTGTGGG |
| 1919 | CCCAGGGGCCCGCCAGGGCC | 3043 | CTTGTATCTTAAATTAGATT | 4168 | AGGATACTTCTTTGTTGTGG |
| 1920 | GCCCAGGGGCCCGCCAGGGC | 3044 | CCTTGTATCTTAAATTAGAT | 4169 | CAGGATACTTCTTTGTTGTG |
| 1921 | TGCCCAGGGGCCCGCCAGGG | 3045 | ACCTTGTATCTTAAATTAGA | 4170 | GCAGGATACTTCTTTGTTGT |
| 1922 | CTGCCCAGGGGCCCGCCAGG | 3046 | AACCTTGTATCTTAAATTAG | 4171 | GGCAGGATACTTCTTTGTTG |
| 1923 | CCTGCCCAGGGGCCCGCCAG | 3047 | CAACCTTGTATCTTAAATTA | 4172 | GGGCAGGATACTTCTTTGTT |
| 1924 | TCCTGCCCAGGGGCCCGCCA | 3048 | ACAACCTTGTATCTTAAATT | 4173 | TGGGCAGGATACTTCTTTGT |
| 1925 | CTCCTGCCCAGGGGCCCGCC | 3049 | CACAACCTTGTATCTTAAAT | 4174 | TTGGGCAGGATACTTCTTTG |
| 1926 | GCTCCTGCCCAGGGGCCCGC | 3050 | GCACAACCTTGTATCTTAAA | 4175 | TTTGGGCAGGATACTTCTTT |
| 1927 | TGCTCCTGCCCAGGGGCCCG | 3051 | CGCACAACCTTGTATCTTAA | 4176 | TTTTGGGCAGGATACTTCTT |
| 1928 | CTGCTCCTGCCCAGGGGCCC | 3052 | GCGCACAACCTTGTATCTTA | 4177 | CTTTTGGGCAGGATACTTCT |
| 1929 | CCTGCTCCTGCCCAGGGGCC | 3053 | GGCGCACAACCTTGTATCTT | 4178 | CCTTTTGGGCAGGATACTTC |
| 1930 | GCCTGCTCCTGCCCAGGGGC | 3054 | TGGCGCACAACCTTGTATCT | 4179 | ACCTTTTGGGCAGGATACTT |
| 1931 | CGCCTGCTCCTGCCCAGGGG | 3055 | CTGGCGCACAACCTTGTATC | 4180 | GACCTTTTGGGCAGGATACT |
| 1932 | TCGCCTGCTCCTGCCCAGGG | 3056 | ACTGGCGCACAACCTTGTAT | 4181 | TGACCTTTTGGGCAGGATAC |
| 1933 | CTCGCCTGCTCCTGCCCAGG | 3057 | AACTGGCGCACAACCTTGTA | 4182 | TTGACCTTTTGGGCAGGATA |
| 1934 | TCTCGCCTGCTCCTGCCCAG | 3058 | CAACTGGCGCACAACCTTGT | 4183 | ATTGACCTTTTGGGCAGGAT |
| 1935 | CTCTCGCCTGCTCCTGCCCA | 3059 | GCAACTGGCGCACAACCTTG | 4184 | TATTGACCTTTTGGGCAGGA |
| 1936 | CCTCTCGCCTGCTCCTGCCC | 3060 | GGCAACTGGCGCACAACCTT | 4185 | CTATTGACCTTTTGGGCAGG |
| 1937 | ACCTCTCGCCTGCTCCTGCC | 3061 | TGGCAACTGGCGCACAACCT | 4186 | ACTATTGACCTTTTGGGCAG |
| 1938 | GACCTCTCGCCTGCTCCTGC | 3062 | CTGGCAACTGGCGCACAACC | 4187 | CACTATTGACCTTTTGGGCA |
| 1939 | AGACCTCTCGCCTGCTCCTG | 3063 | CCTGGCAACTGGCGCACAAC | 4188 | GCACTATTGACCTTTTGGGC |
| 1940 | CAGACCTCTCGCCTGCTCCT | 3064 | ACCTGGCAACTGGCGCACAA | 4189 | AGCACTATTGACCTTTTGGG |
| 1941 | GCAGACCTCTCGCCTGCTCC | 3065 | CACCTGGCAACTGGCGCACA | 4190 | CAGCACTATTGACCTTTTGG |
| 1942 | CGCAGACCTCTCGCCTGCTC | 3066 | ACACCTGGCAACTGGCGCAC | 4191 | TCAGCACTATTGACCTTTTG |
| 1943 | GCGCAGACCTCTCGCCTGCT | 3067 | TACACCTGGCAACTGGCGCA | 4192 | CTCAGCACTATTGACCTTTT |
| 1944 | CGCGCAGACCTCTCGCCTGC | 3068 | CTACACCTGGCAACTGGCGC | 4193 | TCTCAGCACTATTGACCTTT |
| 1945 | CCGCGCAGACCTCTCGCCTG | 3069 | CCTACACCTGGCAACTGGCG | 4194 | GTCTCAGCACTATTGACCTT |
| 1946 | GCCGCGCAGACCTCTCGCCT | 3070 | CCCTACACCTGGCAACTGGC | 4195 | AGTCTCAGCACTATTGACCT |
| 1947 | GGCCGCGCAGACCTCTCGCC | 3071 | TCCCTACACCTGGCAACTGG | 4196 | GAGTCTCAGCACTATTGACC |
| 1948 | CGGCCGCGCAGACCTCTCGC | 3072 | CTCCCTACACCTGGCAACTG | 4197 | TGAGTCTCAGCACTATTGAC |
| 1949 | GCGGCCGCGCAGACCTCTCG | 3073 | TCTCCCTACACCTGGCAACT | 4198 | TTGAGTCTCAGCACTATTGA |
| 1950 | AGCGGCCGCGCAGACCTCTC | 3074 | CTCTCCCTACACCTGGCAAC | 4199 | GTTGAGTCTCAGCACTATTG |
| 1951 | GAGCGGCCGCGCAGACCTCT | 3075 | CCTCTCCCTACACCTGGCAA | 4200 | TGTTGAGTCTCAGCACTATT |
| 1952 | AGAGCGGCCGCGCAGACCTC | 3076 | TCCTCTCCCTACACCTGGCA | 4201 | TTGTTGAGTCTCAGCACTAT |
| 1953 | GAGAGCGGCCGCGCAGACCT | 3077 | TTCCTCTCCCTACACCTGGC | 4202 | GTTGTTGAGTCTCAGCACTA |
| 1954 | GGAGAGCGGCCGCGCAGACC | 3078 | CTTCCTCTCCCTACACCTGG | 4203 | GGTTGTTGAGTCTCAGCACT |
| 1955 | AGGAGAGCGGCCGCGCAGAC | 3079 | ACTTCCTCTCCCTACACCTG | 4204 | AGGTTGTTGAGTCTCAGCAC |
| 1956 | TAGGAGAGCGGCCGCGCAGA | 3080 | TACTTCCTCTCCCTACACCT | 4205 | TAGGTTGTTGAGTCTCAGCA |
| 1957 | GTAGGAGAGCGGCCGCGCAG | 3081 | CTACTTCCTCTCCCTACACC | 4206 | GTAGGTTGTTGAGTCTCAGC |
| 1958 | GGTAGGAGAGCGGCCGCGCA | 3082 | TCTACTTCCTCTCCCTACAC | 4207 | AGTAGGTTGTTGAGTCTCAG |
| 1959 | AGGTAGGAGAGCGGCCGCGC | 3083 | ATCTACTTCCTCTCCCTACA | 4208 | AAGTAGGTTGTTGAGTCTCA |
| 1960 | CAGGTAGGAGAGCGGCCGCG | 3084 | AATCTACTTCCTCTCCCTAC | 4209 | GAAGTAGGTTGTTGAGTCTC |
| 1961 | GCAGGTAGGAGAGCGGCCGC | 3085 | CAATCTACTTCCTCTCCCTA | 4210 | TGAAGTAGGTTGTTGAGTCT |
| 1962 | CGCAGGTAGGAGAGCGGCCG | 3086 | ACAATCTACTTCCTCTCCCT | 4211 | GTGAAGTAGGTTGTTGAGTC |
| 1963 | ACGCAGGTAGGAGAGCGGCC | 3087 | GACAATCTACTTCCTCTCCC | 4212 | TGTGAAGTAGGTTGTTGAGT |
| 1964 | GACGCAGGTAGGAGAGCGGC | 3088 | AGACAATCTACTTCCTCTCC | 4213 | TTGTGAAGTAGGTTGTTGAG |
| 1965 | GGACGCAGGTAGGAGAGCGG | 3089 | GAGACAATCTACTTCCTCTC | 4214 | TTTGTGAAGTAGGTTGTTGA |
| 1966 | CGGACGCAGGTAGGAGAGCG | 3090 | GGAGACAATCTACTTCCTCT | 4215 | ATTTGTGAAGTAGGTTGTTG |
| 1967 | TCGGACGCAGGTAGGAGAGC | 3091 | TGGAGACAATCTACTTCCTC | 4216 | CATTTGTGAAGTAGGTTGTT |
| 1968 | GTCGGACGCAGGTAGGAGAG | 3092 | CTGGAGACAATCTACTTCCT | 4217 | ACATTTGTGAAGTAGGTTGT |
| 1969 | AGTCGGACGCAGGTAGGAGA | 3093 | CCTGGAGACAATCTACTTCC | 4218 | AACATTTGTGAAGTAGGTTG |
| 1970 | GAGTCGGACGCAGGTAGGAG | 3094 | ACCTGGAGACAATCTACTTC | 4219 | AAACATTTGTGAAGTAGGTT |
| 1971 | GGAGTCGGACGCAGGTAGGA | 3095 | CACCTGGAGACAATCTACTT | 4220 | GAAACATTTGTGAAGTAGGT |
| 1972 | CGGAGTCGGACGCAGGTAGG | 3096 | CCACCTGGAGACAATCTACT | 4221 | AGAAACATTTGTGAAGTAGG |
| 1973 | GCGGAGTCGGACGCAGGTAG | 3097 | CCCACCTGGAGACAATCTAC | 4222 | GAGAAACATTTGTGAAGTAG |
| 1974 | CGCGGAGTCGGACGCAGGTA | 3098 | CCCCACCTGGAGACAATCTA | 4223 | AGAGAAACATTTGTGAAGTA |
| 1975 | CCGCGGAGTCGGACGCAGGT | 3099 | TCCCCACCTGGAGACAATCT | 4224 | GAGAGAAACATTTGTGAAGT |
| 1976 | ACCGCGGAGTCGGACGCAGG | 3100 | TTCCCCACCTGGAGACAATC | 4225 | AGAGAGAAACATTTGTGAAG |
| 1977 | GACCGCGGAGTCGGACGCAG | 3101 | CTTCCCCACCTGGAGACAAT | 4226 | GAGAGAGAAACATTTGTGAA |
| 1978 | GGACCGCGGAGTCGGACGCA | 3102 | TCTTCCCCACCTGGAGACAA | 4227 | AGAGAGAGAAACATTTGTGA |
| 1979 | AGGACCGCGGAGTCGGACGC | 3103 | TTCTTCCCCACCTGGAGACA | 4228 | GAGAGAGAGAAACATTTGTG |
| 1980 | AAGGACCGCGGAGTCGGACG | 3104 | CTTCTTCCCCACCTGGAGAC | 4229 | AGAGAGAGAGAAACATTTGT |
| 1981 | CAAGGACCGCGGAGTCGGAC | 3105 | TCTTCTTCCCCACCTGGAGA | 4230 | GAGAGAGAGAGAAACATTTG |
| 1982 | CCAAGGACCGCGGAGTCGGA | 3106 | CTCTTCTTCCCCACCTGGAG | 4231 | AGAGAGAGAGAGAAACATTT |
| 1983 | CCCAAGGACCGCGGAGTCGG | 3107 | TCTCTTCTTCCCCACCTGGA | 4232 | GAGAGAGAGAGAGAAACATT |
| 1984 | GCCCAAGGACCGCGGAGTCG | 3108 | ATCTCTTCTTCCCCACCTGG | 4233 | AGAGAGAGAGAGAGAAACAT |
| 1985 | TGCCCAAGGACCGCGGAGTC | 3109 | AATCTCTTCTTCCCCACCTG | 4234 | GAGAGAGAGAGAGAGAAACA |
| 1986 | CTGCCCAAGGACCGCGGAGT | 3110 | AAATCTCTTCTTCCCCACCT | 4235 | CGAGAGAGAGAGAGAGAAAC |
| 1987 | GCTGCCCAAGGACCGCGGAG | 3111 | GAAATCTCTTCTTCCCCACC | 4236 | GCGAGAGAGAGAGAGAGAAA |
| 1988 | TGCTGCCCAAGGACCGCGGA | 3112 | TGAAATCTCTTCTTCCCCAC | 4237 | AGCGAGAGAGAGAGAGAGAA |
| 1989 | CTGCTGCCCAAGGACCGCGG | 3113 | ATGAAATCTCTTCTTCCCCA | 4238 | GAGCGAGAGAGAGAGAGAGA |
| 1990 | GCTGCTGCCCAAGGACCGCG | 3114 | AATGAAATCTCTTCTTCCCC | 4239 | AGAGCGAGAGAGAGAGAGAG |
| 1991 | TGCTGCTGCCCAAGGACCGC | 3115 | GAATGAAATCTCTTCTTCCC | 4240 | AAGAGCGAGAGAGAGAGAGA |
| 1992 | TTGCTGCTGCCCAAGGACCG | 3116 | GGAATGAAATCTCTTCTTCC | 4241 | AAAGAGCGAGAGAGAGAGAG |
| 1993 | GTTGCTGCTGCCCAAGGACC | 3117 | TGGAATGAAATCTCTTCTTC | 4242 | AAAAGAGCGAGAGAGAGAGA |
| 1994 | GGTTGCTGCTGCCCAAGGAC | 3118 | GTGGAATGAAATCTCTTCTT | 4243 | AAAAAGAGCGAGAGAGAGAG |
| 1995 | CGGTTGCTGCTGCCCAAGGA | 3119 | GGTGGAATGAAATCTCTTCT | 4244 | AAAAAAGAGCGAGAGAGAGA |
| 1996 | CCGGTTGCTGCTGCCCAAGG | 3120 | AGGTGGAATGAAATCTCTTC | 4245 | AAAAAAAGAGCGAGAGAGAG |
| 1997 | CCCGGTTGCTGCTGCCCAAG | 3121 | AAGGTGGAATGAAATCTCTT | 4246 | AAAAAAAAGAGCGAGAGAGA |
| 1998 | ACCCGGTTGCTGCTGCCCAA | 3122 | TAAGGTGGAATGAAATCTCT | 4247 | AAAAAAAAAGAGCGAGAGAG |
| 1999 | TACCCGGTTGCTGCTGCCCA | 3123 | CTAAGGTGGAATGAAATCTC | 4248 | AAAAAAAAAAGAGCGAGAGA |
| 2000 | CTACCCGGTTGCTGCTGCCC | 3124 | CCTAAGGTGGAATGAAATCT | 4249 | AAAAAAAAAAAGAGCGAGAG |
| 2001 | GCTACCCGGTTGCTGCTGCC | 3125 | TCCTAAGGTGGAATGAAATC | 4250 | AAAAAAAAAAAAGAGCGAGA |
| 2002 | CGCTACCCGGTTGCTGCTGC | 3126 | CTCCTAAGGTGGAATGAAAT | 4251 | AAAAAAAAAAAAAGAGCGAG |
| 2003 | GCGCTACCCGGTTGCTGCTG | 3127 | GCTCCTAAGGTGGAATGAAA | 4252 | AAAAAAAAAAAAAAGAGCGA |
| 2004 | AGCGCTACCCGGTTGCTGCT | 3128 | TGCTCCTAAGGTGGAATGAA | 4253 | AAAAAAAAAAAAAAAGAGCG |
| 2005 | GAGCGCTACCCGGTTGCTGC | 3129 | ATGCTCCTAAGGTGGAATGA | 4254 | AAAAAAAAAAAAAAAAGAGC |
| 2006 | TGAGCGCTACCCGGTTGCTG | 3130 | GATGCTCCTAAGGTGGAATG | 4255 | AAAAAAAAAAAAAAAAAGAG |
| 2007 | CTGAGCGCTACCCGGTTGCT | 3131 | AGATGCTCCTAAGGTGGAAT | 4256 | TAAAAAAAAAAAAAAAAAGA |
| 2008 | TCTGAGCGCTACCCGGTTGC | 3132 | GAGATGCTCCTAAGGTGGAA | 4257 | TTAAAAAAAAAAAAAAAAAG |
| 2009 | GTCTGAGCGCTACCCGGTTG | 3133 | GGAGATGCTCCTAAGGTGGA | 4258 | GTTAAAAAAAAAAAAAAAAA |
| 2010 | AGTCTGAGCGCTACCCGGTT | 3134 | AGGAGATGCTCCTAAGGTGG | 4259 | TGTTAAAAAAAAAAAAAAAA |
| 2011 | TAGTCTGAGCGCTACCCGGT | 3135 | AAGGAGATGCTCCTAAGGTG | 4260 | ATGTTAAAAAAAAAAAAAAA |
| 2012 | GTAGTCTGAGCGCTACCCGG | 3136 | CAAGGAGATGCTCCTAAGGT | 4261 | GATGTTAAAAAAAAAAAAAA |
| 2013 | TGTAGTCTGAGCGCTACCCG | 3137 | TCAAGGAGATGCTCCTAAGG | 4262 | TGATGTTAAAAAAAAAAAAA |
| 2014 | CTGTAGTCTGAGCGCTACCC | 3138 | CTCAAGGAGATGCTCCTAAG | 4263 | CTGATGTTAAAAAAAAAAAA |
| 2015 | TCTGTAGTCTGAGCGCTACC | 3139 | GCTCAAGGAGATGCTCCTAA | 4264 | TCTGATGTTAAAAAAAAAAA |
| 2016 | GTCTGTAGTCTGAGCGCTAC | 3140 | AGCTCAAGGAGATGCTCCTA | 4265 | TTCTGATGTTAAAAAAAAAA |
| 2017 | GGTCTGTAGTCTGAGCGCTA | 3141 | CAGCTCAAGGAGATGCTCCT | 4266 | CTTCTGATGTTAAAAAAAAA |
| 2018 | GGGTCTGTAGTCTGAGCGCT | 3142 | TCAGCTCAAGGAGATGCTCC | 4267 | CCTTCTGATGTTAAAAAAAA |
| 2019 | GGGGTCTGTAGTCTGAGCGC | 3143 | CTCAGCTCAAGGAGATGCTC | 4268 | CCCTTCTGATGTTAAAAAAA |
| 2020 | TGGGGTCTGTAGTCTGAGCG | 3144 | ACTCAGCTCAAGGAGATGCT | 4269 | ACCCTTCTGATGTTAAAAAA |
| 2021 | CTGGGGTCTGTAGTCTGAGC | 3145 | GACTCAGCTCAAGGAGATGC | 4270 | TACCCTTCTGATGTTAAAAA |
| 2022 | GCTGGGGTCTGTAGTCTGAG | 3146 | AGACTCAGCTCAAGGAGATG | 4271 | TTACCCTTCTGATGTTAAAA |
| 2023 | CGCTGGGGTCTGTAGTCTGA | 3147 | CAGACTCAGCTCAAGGAGAT | 4272 | CTTACCCTTCTGATGTTAAA |
| 2024 | GCGCTGGGGTCTGTAGTCTG | 3148 | CCAGACTCAGCTCAAGGAGA | 4273 | CCTTACCCTTCTGATGTTAA |
| 2025 | CGCGCTGGGGTCTGTAGTCT | 3149 | CCCAGACTCAGCTCAAGGAG | 4274 | ACCTTACCCTTCTGATGTTA |
| 2026 | TCGCGCTGGGGTCTGTAGTC | 3150 | TCCCAGACTCAGCTCAAGGA | 4275 | CACCTTACCCTTCTGATGTT |
| 2027 | ATCGCGCTGGGGTCTGTAGT | 3151 | TTCCCAGACTCAGCTCAAGG | 4276 | GCACCTTACCCTTCTGATGT |
| 2028 | CATCGCGCTGGGGTCTGTAG | 3152 | CTTCCCAGACTCAGCTCAAG | 4277 | GGCACCTTACCCTTCTGATG |
| 2029 | TCATCGCGCTGGGGTCTGTA | 3153 | TCTTCCCAGACTCAGCTCAA | 4278 | TGGCACCTTACCCTTCTGAT |
| 2030 | GTCATCGCGCTGGGGTCTGT | 3154 | ATCTTCCCAGACTCAGCTCA | 4279 | GTGGCACCTTACCCTTCTGA |
| 2031 | GGTCATCGCGCTGGGGTCTG | 3155 | AATCTTCCCAGACTCAGCTC | 4280 | CGTGGCACCTTACCCTTCTG |
| 2032 | GGGTCATCGCGCTGGGGTCT | 3156 | AAATCTTCCCAGACTCAGCT | 4281 | TCGTGGCACCTTACCCTTCT |
| 2033 | CGGGTCATCGCGCTGGGGTC | 3157 | AAAATCTTCCCAGACTCAGC | 4282 | ATCGTGGCACCTTACCCTTC |
| 2034 | GCGGGTCATCGCGCTGGGGT | 3158 | TAAAATCTTCCCAGACTCAG | 4283 | TATCGTGGCACCTTACCCTT |
| 2035 | GGCGGGTCATCGCGCTGGGG | 3159 | TTAAAATCTTCCCAGACTCA | 4284 | TTATCGTGGCACCTTACCCT |
| 2036 | AGGCGGGTCATCGCGCTGGG | 3160 | GTTAAAATCTTCCCAGACTC | 4285 | GTTATCGTGGCACCTTACCC |
| 2037 | TAGGCGGGTCATCGCGCTGG | 3161 | AGTTAAAATCTTCCCAGACT | 4286 | CGTTATCGTGGCACCTTACC |
| 2038 | GTAGGCGGGTCATCGCGCTG | 3162 | CAGTTAAAATCTTCCCAGAC | 4287 | TCGTTATCGTGGCACCTTAC |
| 2039 | GGTAGGCGGGTCATCGCGCT | 3163 | CCAGTTAAAATCTTCCCAGA | 4288 | CTCGTTATCGTGGCACCTTA |
| 2040 | AGGTAGGCGGGTCATCGCGC | 3164 | GCCAGTTAAAATCTTCCCAG | 4289 | CCTCGTTATCGTGGCACCTT |
| 2041 | GAGGTAGGCGGGTCATCGCG | 3165 | TGCCAGTTAAAATCTTCCCA | 4290 | ACCTCGTTATCGTGGCACCT |
| 2042 | TGAGGTAGGCGGGTCATCGC | 3166 | CTGCCAGTTAAAATCTTCCC | 4291 | GACCTCGTTATCGTGGCACC |
| 2043 | CTGAGGTAGGCGGGTCATCG | 3167 | CCTGCCAGTTAAAATCTTCC | 4292 | AGACCTCGTTATCGTGGCAC |
| 2044 | ACTGAGGTAGGCGGGTCATC | 3168 | ACCTGCCAGTTAAAATCTTC | 4293 | CAGACCTCGTTATCGTGGCA |
| 2045 | AACTGAGGTAGGCGGGTCAT | 3169 | CACCTGCCAGTTAAAATCTT | 4294 | ACAGACCTCGTTATCGTGGC |
| 2046 | AAACTGAGGTAGGCGGGTCA | 3170 | CCACCTGCCAGTTAAAATCT | 4295 | TACAGACCTCGTTATCGTGG |
| 2047 | GAAACTGAGGTAGGCGGGTC | 3171 | TCCACCTGCCAGTTAAAATC | 4296 | TTACAGACCTCGTTATCGTG |
| 2048 | GGAAACTGAGGTAGGCGGGT | 3172 | CTCCACCTGCCAGTTAAAAT | 4297 | ATTACAGACCTCGTTATCGT |
| 2049 | TGGAAACTGAGGTAGGCGGG | 3173 | CCTCCACCTGCCAGTTAAAA | 4298 | AATTACAGACCTCGTTATCG |
| 2050 | ATGGAAACTGAGGTAGGCGG | 3174 | TCCTCCACCTGCCAGTTAAA | 4299 | GAATTACAGACCTCGTTATC |
| 2051 | AATGGAAACTGAGGTAGGCG | 3175 | CTCCTCCACCTGCCAGTTAA | 4300 | GGAATTACAGACCTCGTTAT |
| 2052 | CAATGGAAACTGAGGTAGGC | 3176 | CCTCCTCCACCTGCCAGTTA | 4301 | GGGAATTACAGACCTCGTTA |
| 2053 | CCAATGGAAACTGAGGTAGG | 3177 | TCCTCCTCCACCTGCCAGTT | 4302 | AGGGAATTACAGACCTCGTT |
| 2054 | GCCAATGGAAACTGAGGTAG | 3178 | CTCCTCCTCCACCTGCCAGT | 4303 | TAGGGAATTACAGACCTCGT |
| 2055 | GGCCAATGGAAACTGAGGTA | 3179 | CCTCCTCCTCCACCTGCCAG | 4304 | GTAGGGAATTACAGACCTCG |
| 2056 | TGGCCAATGGAAACTGAGGT | 3180 | ACCTCCTCCTCCACCTGCCA | 4305 | AGTAGGGAATTACAGACCTC |
| 2057 | CTGGCCAATGGAAACTGAGG | 3181 | CACCTCCTCCTCCACCTGCC | 4306 | GAGTAGGGAATTACAGACCT |
| 2058 | CCTGGCCAATGGAAACTGAG | 3182 | ACACCTCCTCCTCCACCTGC | 4307 | TGAGTAGGGAATTACAGACC |
| 2059 | CCCTGGCCAATGGAAACTGA | 3183 | AACACCTCCTCCTCCACCTG | 4308 | CTGAGTAGGGAATTACAGAC |
| 2060 | TCCCTGGCCAATGGAAACTG | 3184 | CAACACCTCCTCCTCCACCT | 4309 | CCTGAGTAGGGAATTACAGA |
| 2061 | ATCCCTGGCCAATGGAAACT | 3185 | CCAACACCTCCTCCTCCACC | 4310 | TCCTGAGTAGGGAATTACAG |
| 2062 | GATCCCTGGCCAATGGAAAC | 3186 | CCCAACACCTCCTCCTCCAC | 4311 | CTCCTGAGTAGGGAATTACA |
| 2063 | TGATCCCTGGCCAATGGAAA | 3187 | TCCCAACACCTCCTCCTCCA | 4312 | CCTCCTGAGTAGGGAATTAC |
| 2064 | CTGATCCCTGGCCAATGGAA | 3188 | TTCCCAACACCTCCTCCTCC | 4313 | GCCTCCTGAGTAGGGAATTA |
| 2065 | CCTGATCCCTGGCCAATGGA | 3189 | CTTCCCAACACCTCCTCCTC | 4314 | GGCCTCCTGAGTAGGGAATT |
| 2066 | CCCTGATCCCTGGCCAATGG | 3190 | TCTTCCCAACACCTCCTCCT | 4315 | CGGCCTCCTGAGTAGGGAAT |
| 2067 | GCCCTGATCCCTGGCCAATG | 3191 | CTCTTCCCAACACCTCCTCC | 4316 | TCGGCCTCCTGAGTAGGGAA |
| 2068 | AGCCCTGATCCCTGGCCAAT | 3192 | GCTCTTCCCAACACCTCCTC | 4317 | CTCGGCCTCCTGAGTAGGGA |
| 2069 | TAGCCCTGATCCCTGGCCAA | 3193 | GGCTCTTCCCAACACCTCCT | 4318 | CCTCGGCCTCCTGAGTAGGG |
| 2070 | GTAGCCCTGATCCCTGGCCA | 3194 | GGGCTCTTCCCAACACCTCC | 4319 | GCCTCGGCCTCCTGAGTAGG |
| 2071 | GGTAGCCCTGATCCCTGGCC | 3195 | AGGGCTCTTCCCAACACCTC | 4320 | TGCCTCGGCCTCCTGAGTAG |
| 2072 | GGGTAGCCCTGATCCCTGGC | 3196 | CAGGGCTCTTCCCAACACCT | 4321 | CTGCCTCGGCCTCCTGAGTA |
| 2073 | CGGGTAGCCCTGATCCCTGG | 3197 | CCAGGGCTCTTCCCAACACC | 4322 | CCTGCCTCGGCCTCCTGAGT |
| 2074 | GCGGGTAGCCCTGATCCCTG | 3198 | CCCAGGGCTCTTCCCAACAC | 4323 | TCCTGCCTCGGCCTCCTGAG |
| 2075 | AGCGGGTAGCCCTGATCCCT | 3199 | TCCCAGGGCTCTTCCCAACA | 4324 | CTCCTGCCTCGGCCTCCTGA |
| 2076 | GAGCGGGTAGCCCTGATCCC | 3200 | TTCCCAGGGCTCTTCCCAAC | 4325 | TCTCCTGCCTCGGCCTCCTG |
| 2077 | GGAGCGGGTAGCCCTGATCC | 3201 | TTTCCCAGGGCTCTTCCCAA | 4326 | TTCTCCTGCCTCGGCCTCCT |
| 2078 | GGGAGCGGGTAGCCCTGATC | 3202 | GTTTCCCAGGGCTCTTCCCA | 4327 | ATTCTCCTGCCTCGGCCTCC |
| 2079 | TGGGAGCGGGTAGCCCTGAT | 3203 | GGTTTCCCAGGGCTCTTCCC | 4328 | GATTCTCCTGCCTCGGCCTC |
| 2080 | ATGGGAGCGGGTAGCCCTGA | 3204 | TGGTTTCCCAGGGCTCTTCC | 4329 | CGATTCTCCTGCCTCGGCCT |
| 2081 | AATGGGAGCGGGTAGCCCTG | 3205 | CTGGTTTCCCAGGGCTCTTC | 4330 | GCGATTCTCCTGCCTCGGCC |
| 2082 | CAATGGGAGCGGGTAGCCCT | 3206 | TCTGGTTTCCCAGGGCTCTT | 4331 | AGCGATTCTCCTGCCTCGGC |
| 2083 | CCAATGGGAGCGGGTAGCCC | 3207 | ATCTGGTTTCCCAGGGCTCT | 4332 | AAGCGATTCTCCTGCCTCGG |
| 2084 | GCCAATGGGAGCGGGTAGCC | 3208 | CATCTGGTTTCCCAGGGCTC | 4333 | CAAGCGATTCTCCTGCCTCG |
| 2085 | AGCCAATGGGAGCGGGTAGC | 3209 | CCATCTGGTTTCCCAGGGCT | 4334 | TCAAGCGATTCTCCTGCCTC |
| 2086 | TAGCCAATGGGAGCGGGTAG | 3210 | CCCATCTGGTTTCCCAGGGC | 4335 | TTCAAGCGATTCTCCTGCCT |
| 2087 | GTAGCCAATGGGAGCGGGTA | 3211 | TCCCATCTGGTTTCCCAGGG | 4336 | GTTCAAGCGATTCTCCTGCC |
| 2088 | AGTAGCCAATGGGAGCGGGT | 3212 | TTCCCATCTGGTTTCCCAGG | 4337 | GGTTCAAGCGATTCTCCTGC |
| 2089 | AAGTAGCCAATGGGAGCGGG | 3213 | CTTCCCATCTGGTTTCCCAG | 4338 | GGGTTCAAGCGATTCTCCTG |
| 2090 | TAAGTAGCCAATGGGAGCGG | 3214 | CCTTCCCATCTGGTTTCCCA | 4339 | CGGGTTCAAGCGATTCTCCT |
| 2091 | ATAAGTAGCCAATGGGAGCG | 3215 | CCCTTCCCATCTGGTTTCCC | 4340 | CCGGGTTCAAGCGATTCTCC |
| 2092 | GATAAGTAGCCAATGGGAGC | 3216 | GCCCTTCCCATCTGGTTTCC | 4341 | CCCGGGTTCAAGCGATTCTC |
| 2093 | TGATAAGTAGCCAATGGGAG | 3217 | TGCCCTTCCCATCTGGTTTC | 4342 | TCCCGGGTTCAAGCGATTCT |
| 2094 | TTGATAAGTAGCCAATGGGA | 3218 | CTGCCCTTCCCATCTGGTTT | 4343 | ATCCCGGGTTCAAGCGATTC |
| 2095 | ATTGATAAGTAGCCAATGGG | 3219 | CCTGCCCTTCCCATCTGGTT | 4344 | CATCCCGGGTTCAAGCGATT |
| 2096 | TATTGATAAGTAGCCAATGG | 3220 | GCCTGCCCTTCCCATCTGGT | 4345 | GCATCCCGGGTTCAAGCGAT |
| 2097 | ATATTGATAAGTAGCCAATG | 3221 | AGCCTGCCCTTCCCATCTGG | 4346 | TGCATCCCGGGTTCAAGCGA |
| 2098 | TATATTGATAAGTAGCCAAT | 3222 | AAGCCTGCCCTTCCCATCTG | 4347 | CTGCATCCCGGGTTCAAGCG |
| 2099 | CTATATTGATAAGTAGCCAA | 3223 | CAAGCCTGCCCTTCCCATCT | 4348 | TCTGCATCCCGGGTTCAAGC |
| 2100 | TCTATATTGATAAGTAGCCA | 3224 | CCAAGCCTGCCCTTCCCATC | 4349 | CTCTGCATCCCGGGTTCAAG |
| 2101 | CTCTATATTGATAAGTAGCC | 3225 | GCCAAGCCTGCCCTTCCCAT | 4350 | CCTCTGCATCCCGGGTTCAA |
| 2102 | CCTCTATATTGATAAGTAGC | 3226 | TGCCAAGCCTGCCCTTCCCA | 4351 | ACCTCTGCATCCCGGGTTCA |
| 2103 | ACCTCTATATTGATAAGTAG | 3227 | CTGCCAAGCCTGCCCTTCCC | 4352 | AACCTCTGCATCCCGGGTTC |
| 2104 | CACCTCTATATTGATAAGTA | 3228 | CCTGCCAAGCCTGCCCTTCC | 4353 | CAACCTCTGCATCCCGGGTT |
| 2105 | CCACCTCTATATTGATAAGT | 3229 | CCCTGCCAAGCCTGCCCTTC | 4354 | GCAACCTCTGCATCCCGGGT |
| 2106 | CCCACCTCTATATTGATAAG | 3230 | TCCCTGCCAAGCCTGCCCTT | 4355 | TGCAACCTCTGCATCCCGGG |
| 2107 | CCCCACCTCTATATTGATAA | 3231 | ATCCCTGCCAAGCCTGCCCT | 4356 | CTGCAACCTCTGCATCCCGG |
| 2108 | GCCCCACCTCTATATTGATA | 3232 | AATCCCTGCCAAGCCTGCCC | 4357 | ACTGCAACCTCTGCATCCCG |
| 2109 | GGCCCCACCTCTATATTGAT | 3233 | CAATCCCTGCCAAGCCTGCC | 4358 | TACTGCAACCTCTGCATCCC |
| 2110 | TGGCCCCACCTCTATATTGA | 3234 | TCAATCCCTGCCAAGCCTGC | 4359 | TTACTGCAACCTCTGCATCC |
| 2111 | CTGGCCCCACCTCTATATTG | 3235 | TTCAATCCCTGCCAAGCCTG | 4360 | TTTACTGCAACCTCTGCATC |
| 2112 | GCTGGCCCCACCTCTATATT | 3236 | ATTCAATCCCTGCCAAGCCT | 4361 | GTTTACTGCAACCTCTGCAT |
| 2113 | GGCTGGCCCCACCTCTATAT | 3237 | CATTCAATCCCTGCCAAGCC | 4362 | GGTTTACTGCAACCTCTGCA |
| 2114 | AGGCTGGCCCCACCTCTATA | 3238 | GCATTCAATCCCTGCCAAGC | 4363 | CGGTTTACTGCAACCTCTGC |
| 2115 | CAGGCTGGCCCCACCTCTAT | 3239 | GGCATTCAATCCCTGCCAAG | 4364 | TCGGTTTACTGCAACCTCTG |
| 2116 | CCAGGCTGGCCCCACCTCTA | 3240 | TGGCATTCAATCCCTGCCAA | 4365 | CTCGGTTTACTGCAACCTCT |
| 2117 | TCCAGGCTGGCCCCACCTCT | 3241 | ATGGCATTCAATCCCTGCCA | 4366 | TCTCGGTTTACTGCAACCTC |
| 2118 | TTCCAGGCTGGCCCCACCTC | 3242 | CATGGCATTCAATCCCTGCC | 4367 | ATCTCGGTTTACTGCAACCT |
| 2119 | ATTCCAGGCTGGCCCCACCT | 3243 | ACATGGCATTCAATCCCTGC | 4368 | GATCTCGGTTTACTGCAACC |
| 2120 | CATTCCAGGCTGGCCCCACC | 3244 | AACATGGCATTCAATCCCTG | 4369 | CGATCTCGGTTTACTGCAAC |
| 2121 | GCATTCCAGGCTGGCCCCAC | 3245 | GAACATGGCATTCAATCCCT | 4370 | ACGATCTCGGTTTACTGCAA |
| 2122 | AGCATTCCAGGCTGGCCCCA | 3246 | TGAACATGGCATTCAATCCC | 4371 | CACGATCTCGGTTTACTGCA |
| 2123 | CAGCATTCCAGGCTGGCCCC | 3247 | TTGAACATGGCATTCAATCC | 4372 | GCACGATCTCGGTTTACTGC |
| 2124 | ACAGCATTCCAGGCTGGCCC | 3248 | ATTGAACATGGCATTCAATC | 4373 | GGCACGATCTCGGTTTACTG |
| 2125 | CACAGCATTCCAGGCTGGCC | 3249 | CATTGAACATGGCATTCAAT | 4374 | TGGCACGATCTCGGTTTACT |
| 2126 | ACACAGCATTCCAGGCTGGC | 3250 | GCATTGAACATGGCATTCAA | 4375 | GTGGCACGATCTCGGTTTAC |
| 2127 | AACACAGCATTCCAGGCTGG | 3251 | GGCATTGAACATGGCATTCA | 4376 | AGTGGCACGATCTCGGTTTA |
| 2128 | AAACACAGCATTCCAGGCTG | 3252 | TGGCATTGAACATGGCATTC | 4377 | CAGTGGCACGATCTCGGTTT |
| 2129 | GAAACACAGCATTCCAGGCT | 3253 | CTGGCATTGAACATGGCATT | 4378 | GCAGTGGCACGATCTCGGTT |
| 2130 | AGAAACACAGCATTCCAGGC | 3254 | ACTGGCATTGAACATGGCAT | 4379 | TGCAGTGGCACGATCTCGGT |
| 2131 | AAGAAACACAGCATTCCAGG | 3255 | CACTGGCATTGAACATGGCA | 4380 | ATGCAGTGGCACGATCTCGG |
| 2132 | AAAGAAACACAGCATTCCAG | 3256 | CCACTGGCATTGAACATGGC | 4381 | AATGCAGTGGCACGATCTCG |
| 2133 | AAAAGAAACACAGCATTCCA | 3257 | CCCACTGGCATTGAACATGG | 4382 | GAATGCAGTGGCACGATCTC |
| 2134 | GAAAAGAAACACAGCATTCC | 3258 | GCCCACTGGCATTGAACATG | 4383 | GGAATGCAGTGGCACGATCT |
| 2135 | AGAAAAGAAACACAGCATTC | 3259 | AGCCCACTGGCATTGAACAT | 4384 | TGGAATGCAGTGGCACGATC |
| 2136 | TAGAAAAGAAACACAGCATT | 3260 | AAGCCCACTGGCATTGAACA | 4385 | CTGGAATGCAGTGGCACGAT |
| 2137 | GTAGAAAAGAAACACAGCAT | 3261 | GAAGCCCACTGGCATTGAAC | 4386 | GCTGGAATGCAGTGGCACGA |
| 2138 | AGTAGAAAAGAAACACAGCA | 3262 | TGAAGCCCACTGGCATTGAA | 4387 | GGCTGGAATGCAGTGGCACG |
| 2139 | GAGTAGAAAAGAAACACAGC | 3263 | CTGAAGCCCACTGGCATTGA | 4388 | AGGCTGGAATGCAGTGGCAC |
| 2140 | TGAGTAGAAAAGAAACACAG | 3264 | CCTGAAGCCCACTGGCATTG | 4389 | CAGGCTGGAATGCAGTGGCA |
| 2141 | TTGAGTAGAAAAGAAACACA | 3265 | TCCTGAAGCCCACTGGCATT | 4390 | CCAGGCTGGAATGCAGTGGC |
| 2142 | TTTGAGTAGAAAAGAAACAC | 3266 | CTCCTGAAGCCCACTGGCAT | 4391 | TCCAGGCTGGAATGCAGTGG |
| 2143 | ATTTGAGTAGAAAAGAAACA | 3267 | GCTCCTGAAGCCCACTGGCA | 4392 | GTCCAGGCTGGAATGCAGTG |
| 2144 | GATTTGAGTAGAAAAGAAAC | 3268 | AGCTCCTGAAGCCCACTGGC | 4393 | TGTCCAGGCTGGAATGCAGT |
| 2145 | TGATTTGAGTAGAAAAGAAA | 3269 | CAGCTCCTGAAGCCCACTGG | 4394 | TTGTCCAGGCTGGAATGCAG |
| 2146 | GTGATTTGAGTAGAAAAGAA | 3270 | GCAGCTCCTGAAGCCCACTG | 4395 | GTTGTCCAGGCTGGAATGCA |
| 2147 | AGTGATTTGAGTAGAAAAGA | 3271 | AGCAGCTCCTGAAGCCCACT | 4396 | TGTTGTCCAGGCTGGAATGC |
| 2148 | GAGTGATTTGAGTAGAAAAG | 3272 | CAGCAGCTCCTGAAGCCCAC | 4397 | CTGTTGTCCAGGCTGGAATG |
| 2149 | AGAGTGATTTGAGTAGAAAA | 3273 | CCAGCAGCTCCTGAAGCCCA | 4398 | TCTGTTGTCCAGGCTGGAAT |
| 2150 | GAGAGTGATTTGAGTAGAAA | 3274 | CCCAGCAGCTCCTGAAGCCC | 4399 | CTCTGTTGTCCAGGCTGGAA |
| 2151 | GGAGAGTGATTTGAGTAGAA | 3275 | ACCCAGCAGCTCCTGAAGCC | 4400 | GCTCTGTTGTCCAGGCTGGA |
| 2152 | AGGAGAGTGATTTGAGTAGA | 3276 | CACCCAGCAGCTCCTGAAGC | 4401 | CGCTCTGTTGTCCAGGCTGG |
| 2153 | GAGGAGAGTGATTTGAGTAG | 3277 | GCACCCAGCAGCTCCTGAAG | 4402 | TCGCTCTGTTGTCCAGGCTG |
| 2154 | GGAGGAGAGTGATTTGAGTA | 3278 | GGCACCCAGCAGCTCCTGAA | 4403 | CTCGCTCTGTTGTCCAGGCT |
| 2155 | GGGAGGAGAGTGATTTGAGT | 3279 | AGGCACCCAGCAGCTCCTGA | 4404 | TCTCGCTCTGTTGTCCAGGC |
| 2156 | AGGGAGGAGAGTGATTTGAG | 3280 | CAGGCACCCAGCAGCTCCTG | 4405 | GTCTCGCTCTGTTGTCCAGG |
| 2157 | CAGGGAGGAGAGTGATTTGA | 3281 | CCAGGCACCCAGCAGCTCCT | 4406 | AGTCTCGCTCTGTTGTCCAG |
| 2158 | GCAGGGAGGAGAGTGATTTG | 3282 | GCCAGGCACCCAGCAGCTCC | 4407 | GAGTCTCGCTCTGTTGTCCA |
| 2159 | AGCAGGGAGGAGAGTGATTT | 3283 | TGCCAGGCACCCAGCAGCTC | 4408 | GGAGTCTCGCTCTGTTGTCC |
| 2160 | AAGCAGGGAGGAGAGTGATT | 3284 | GTGCCAGGCACCCAGCAGCT | 4409 | TGGAGTCTCGCTCTGTTGTC |
| 2161 | GAAGCAGGGAGGAGAGTGAT | 3285 | CGTGCCAGGCACCCAGCAGC | 4410 | ATGGAGTCTCGCTCTGTTGT |
| 2162 | GGAAGCAGGGAGGAGAGTGA | 3286 | CCGTGCCAGGCACCCAGCAG | 4411 | GATGGAGTCTCGCTCTGTTG |
| 2163 | AGGAAGCAGGGAGGAGAGTG | 3287 | CCCGTGCCAGGCACCCAGCA | 4412 | GGATGGAGTCTCGCTCTGTT |
| 2164 | GAGGAAGCAGGGAGGAGAGT | 3288 | GCCCGTGCCAGGCACCCAGC | 4413 | TGGATGGAGTCTCGCTCTGT |
| 2165 | AGAGGAAGCAGGGAGGAGAG | 3289 | AGCCCGTGCCAGGCACCCAG | 4414 | GTGGATGGAGTCTCGCTCTG |
| 2166 | GAGAGGAAGCAGGGAGGAGA | 3290 | CAGCCCGTGCCAGGCACCCA | 4415 | GGTGGATGGAGTCTCGCTCT |
| 2167 | CGAGAGGAAGCAGGGAGGAG | 3291 | CCAGCCCGTGCCAGGCACCC | 4416 | GGGTGGATGGAGTCTCGCTC |
| 2168 | GCGAGAGGAAGCAGGGAGGA | 3292 | CCCAGCCCGTGCCAGGCACC | 4417 | GGGGTGGATGGAGTCTCGCT |
| 2169 | GGCGAGAGGAAGCAGGGAGG | 3293 | GCCCAGCCCGTGCCAGGCAC | 4418 | GGGGGTGGATGGAGTCTCGC |
| 2170 | GGGCGAGAGGAAGCAGGGAG | 3294 | AGCCCAGCCCGTGCCAGGCA | 4419 | CGGGGGTGGATGGAGTCTCG |
| 2171 | GGGGCGAGAGGAAGCAGGGA | 3295 | CAGCCCAGCCCGTGCCAGGC | 4420 | GCGGGGGTGGATGGAGTCTC |
| 2172 | TGGGGCGAGAGGAAGCAGGG | 3296 | ACAGCCCAGCCCGTGCCAGG | 4421 | GGCGGGGGTGGATGGAGTCT |
| 2173 | GTGGGGCGAGAGGAAGCAGG | 3297 | CACAGCCCAGCCCGTGCCAG | 4422 | TGGCGGGGGTGGATGGAGTC |
| 2174 | TGTGGGGCGAGAGGAAGCAG | 3298 | CCACAGCCCAGCCCGTGCCA | 4423 | TTGGCGGGGGTGGATGGAGT |
| 2175 | GTGTGGGGCGAGAGGAAGCA | 3299 | ACCACAGCCCAGCCCGTGCC | 4424 | GTTGGCGGGGGTGGATGGAG |
| 2176 | GGTGTGGGGCGAGAGGAAGC | 3300 | CACCACAGCCCAGCCCGTGC | 4425 | TGTTGGCGGGGGTGGATGGA |
| 2177 | GGGTGTGGGGCGAGAGGAAG | 3301 | CCACCACAGCCCAGCCCGTG | 4426 | GTGTTGGCGGGGGTGGATGG |
| 2178 | GGGGTGTGGGGCGAGAGGAA | 3302 | CCCACCACAGCCCAGCCCGT | 4427 | TGTGTTGGCGGGGGTGGATG |
| 2179 | TGGGGTGTGGGGCGAGAGGA | 3303 | CCCCACCACAGCCCAGCCCG | 4428 | TTGTGTTGGCGGGGGTGGAT |
| 2180 | ATGGGGTGTGGGGCGAGAGG | 3304 | CCCCCACCACAGCCCAGCCC | 4429 | TTTGTGTTGGCGGGGGTGGA |
| 2181 | AATGGGGTGTGGGGCGAGAG | 3305 | GCCCCCACCACAGCCCAGCC | 4430 | TTTTGTGTTGGCGGGGGTGG |
| 2182 | AAATGGGGTGTGGGGCGAGA | 3306 | AGCCCCCACCACAGCCCAGC | 4431 | TTTTTGTGTTGGCGGGGGTG |
| 2183 | GAAATGGGGTGTGGGGCGAG | 3307 | CAGCCCCCACCACAGCCCAG | 4432 | TTTTTTGTGTTGGCGGGGGT |
| 2184 | AGAAATGGGGTGTGGGGCGA | 3308 | ACAGCCCCCACCACAGCCCA | 4433 | TTTTTTTGTGTTGGCGGGGG |
| 2185 | TAGAAATGGGGTGTGGGGCG | 3309 | GACAGCCCCCACCACAGCCC | 4434 | ATTTTTTTGTGTTGGCGGGG |
| 2186 | CTAGAAATGGGGTGTGGGGC | 3310 | CGACAGCCCCCACCACAGCC | 4435 | AATTTTTTTGTGTTGGCGGG |
| 2187 | CCTAGAAATGGGGTGTGGGG | 3311 | TCGACAGCCCCCACCACAGC | 4436 | TAATTTTTTTGTGTTGGCGG |
| 2188 | CCCTAGAAATGGGGTGTGGG | 3312 | TTCGACAGCCCCCACCACAG | 4437 | TTAATTTTTTTGTGTTGGCG |
| 2189 | TCCCTAGAAATGGGGTGTGG | 3313 | TTTCGACAGCCCCCACCACA | 4438 | TTTAATTTTTTTGTGTTGGC |
| 2190 | ATCCCTAGAAATGGGGTGTG | 3314 | CTTTCGACAGCCCCCACCAC | 4439 | CTTTAATTTTTTTGTGTTGG |
| 2191 | GATCCCTAGAAATGGGGTGT | 3315 | TCTTTCGACAGCCCCCACCA | 4440 | ACTTTAATTTTTTTGTGTTG |
| 2192 | TGATCCCTAGAAATGGGGTG | 3316 | CTCTTTCGACAGCCCCCACC | 4441 | CACTTTAATTTTTTTGTGTT |
| 2193 | ATGATCCCTAGAAATGGGGT | 3317 | TCTCTTTCGACAGCCCCCAC | 4442 | ACACTTTAATTTTTTTGTGT |
| 2194 | CATGATCCCTAGAAATGGGG | 3318 | TTCTCTTTCGACAGCCCCCA | 4443 | TACACTTTAATTTTTTTGTG |
| 2195 | ACATGATCCCTAGAAATGGG | 3319 | CTTCTCTTTCGACAGCCCCC | 4444 | GTACACTTTAATTTTTTTGT |
| 2196 | CACATGATCCCTAGAAATGG | 3320 | ACTTCTCTTTCGACAGCCCC | 4445 | TGTACACTTTAATTTTTTTG |
| 2197 | TCACATGATCCCTAGAAATG | 3321 | CACTTCTCTTTCGACAGCCC | 4446 | TTGTACACTTTAATTTTTTT |
| 2198 | ATCACATGATCCCTAGAAAT | 3322 | CCACTTCTCTTTCGACAGCC | 4447 | GTTGTACACTTTAATTTTTT |
| 2199 | AATCACATGATCCCTAGAAA | 3323 | GCCACTTCTCTTTCGACAGC | 4448 | AGTTGTACACTTTAATTTTT |
| 2200 | CAATCACATGATCCCTAGAA | 3324 | AGCCACTTCTCTTTCGACAG | 4449 | GAGTTGTACACTTTAATTTT |
| 2201 | CCAATCACATGATCCCTAGA | 3325 | AAGCCACTTCTCTTTCGACA | 4450 | TGAGTTGTACACTTTAATTT |
| 2202 | TCCAATCACATGATCCCTAG | 3326 | GAAGCCACTTCTCTTTCGAC | 4451 | TTGAGTTGTACACTTTAATT |
| 2203 | CTCCAATCACATGATCCCTA | 3327 | GGAAGCCACTTCTCTTTCGA | 4452 | ATTGAGTTGTACACTTTAAT |
| 2204 | TCTCCAATCACATGATCCCT | 3328 | AGGAAGCCACTTCTCTTTCG | 4453 | CATTGAGTTGTACACTTTAA |
| 2205 | TTCTCCAATCACATGATCCC | 3329 | TAGGAAGCCACTTCTCTTTC | 4454 | CCATTGAGTTGTACACTTTA |
| 2206 | ATTCTCCAATCACATGATCC | 3330 | CTAGGAAGCCACTTCTCTTT | 4455 | ACCATTGAGTTGTACACTTT |
| 2207 | GATTCTCCAATCACATGATC | 3331 | ACTAGGAAGCCACTTCTCTT | 4456 | AACCATTGAGTTGTACACTT |
| 2208 | TGATTCTCCAATCACATGAT | 3332 | GACTAGGAAGCCACTTCTCT | 4457 | AAACCATTGAGTTGTACACT |
| 2209 | ATGATTCTCCAATCACATGA | 3333 | AGACTAGGAAGCCACTTCTC | 4458 | AAAACCATTGAGTTGTACAC |
| 2210 | CATGATTCTCCAATCACATG | 3334 | GAGACTAGGAAGCCACTTCT | 4459 | AAAAACCATTGAGTTGTACA |
| 2211 | ACATGATTCTCCAATCACAT | 3335 | GGAGACTAGGAAGCCACTTC | 4460 | TAAAAACCATTGAGTTGTAC |
| 2212 | CACATGATTCTCCAATCACA | 3336 | TGGAGACTAGGAAGCCACTT | 4461 | CTAAAAACCATTGAGTTGTA |
| 2213 | TCACATGATTCTCCAATCAC | 3337 | CTGGAGACTAGGAAGCCACT | 4462 | ACTAAAAACCATTGAGTTGT |
| 2214 | GTCACATGATTCTCCAATCA | 3338 | TCTGGAGACTAGGAAGCCAC | 4463 | CACTAAAAACCATTGAGTTG |
| 2215 | CGTCACATGATTCTCCAATC | 3339 | ATCTGGAGACTAGGAAGCCA | 4464 | ACACTAAAAACCATTGAGTT |
| 2216 | ACGTCACATGATTCTCCAAT | 3340 | GATCTGGAGACTAGGAAGCC | 4465 | GACACTAAAAACCATTGAGT |
| 2217 | GACGTCACATGATTCTCCAA | 3341 | CGATCTGGAGACTAGGAAGC | 4466 | AGACACTAAAAACCATTGAG |
| 2218 | CGACGTCACATGATTCTCCA | 3342 | CCGATCTGGAGACTAGGAAG | 4467 | AAGACACTAAAAACCATTGA |
| 2219 | CCGACGTCACATGATTCTCC | 3343 | GCCGATCTGGAGACTAGGAA | 4468 | TAAGACACTAAAAACCATTG |
| 2220 | CCCGACGTCACATGATTCTC | 3344 | GGCCGATCTGGAGACTAGGA | 4469 | TTAAGACACTAAAAACCATT |
| 2221 | TCCCGACGTCACATGATTCT | 3345 | GGGCCGATCTGGAGACTAGG | 4470 | CTTAAGACACTAAAAACCAT |
| 2222 | GTCCCGACGTCACATGATTC | 3346 | AGGGCCGATCTGGAGACTAG | 4471 | TCTTAAGACACTAAAAACCA |
| 2223 | TGTCCCGACGTCACATGATT | 3347 | CAGGGCCGATCTGGAGACTA | 4472 | CTCTTAAGACACTAAAAACC |
| 2224 | CTGTCCCGACGTCACATGAT | 3348 | GCAGGGCCGATCTGGAGACT | 4473 | TCTCTTAAGACACTAAAAAC |
| 2225 | GCTGTCCCGACGTCACATGA | 3349 | GGCAGGGCCGATCTGGAGAC | 4474 | CTCTCTTAAGACACTAAAAA |
| 2226 | GGCTGTCCCGACGTCACATG | 3350 | AGGCAGGGCCGATCTGGAGA | 4475 | ACTCTCTTAAGACACTAAAA |
| 2227 | AGGCTGTCCCGACGTCACAT | 3351 | AAGGCAGGGCCGATCTGGAG | 4476 | AACTCTCTTAAGACACTAAA |
| 2228 | GAGGCTGTCCCGACGTCACA | 3352 | GAAGGCAGGGCCGATCTGGA | 4477 | TAACTCTCTTAAGACACTAA |
| 2229 | TGAGGCTGTCCCGACGTCAC | 3353 | CGAAGGCAGGGCCGATCTGG | 4478 | ATAACTCTCTTAAGACACTA |
| 2230 | CTGAGGCTGTCCCGACGTCA | 3354 | TCGAAGGCAGGGCCGATCTG | 4479 | CATAACTCTCTTAAGACACT |
| 2231 | GCTGAGGCTGTCCCGACGTC | 3355 | CTCGAAGGCAGGGCCGATCT | 4480 | GCATAACTCTCTTAAGACAC |
| 2232 | TGCTGAGGCTGTCCCGACGT | 3356 | CCTCGAAGGCAGGGCCGATC | 4481 | TGCATAACTCTCTTAAGACA |
| 2233 | CTGCTGAGGCTGTCCCGACG | 3357 | TCCTCGAAGGCAGGGCCGAT | 4482 | CTGCATAACTCTCTTAAGAC |
| 2234 | CCTGCTGAGGCTGTCCCGAC | 3358 | TTCCTCGAAGGCAGGGCCGA | 4483 | GCTGCATAACTCTCTTAAGA |
| 2235 | CCCTGCTGAGGCTGTCCCGA | 3359 | ATTCCTCGAAGGCAGGGCCG | 4484 | TGCTGCATAACTCTCTTAAG |
| 2236 | GCCCTGCTGAGGCTGTCCCG | 3360 | AATTCCTCGAAGGCAGGGCC | 4485 | ATGCTGCATAACTCTCTTAA |
| 2237 | TGCCCTGCTGAGGCTGTCCC | 3361 | CAATTCCTCGAAGGCAGGGC | 4486 | GATGCTGCATAACTCTCTTA |
| 2238 | CTGCCCTGCTGAGGCTGTCC | 3362 | TCAATTCCTCGAAGGCAGGG | 4487 | TGATGCTGCATAACTCTCTT |
| 2239 | GCTGCCCTGCTGAGGCTGTC | 3363 | ATCAATTCCTCGAAGGCAGG | 4488 | ATGATGCTGCATAACTCTCT |
| 2240 | AGCTGCCCTGCTGAGGCTGT | 3364 | TATCAATTCCTCGAAGGCAG | 4489 | AATGATGCTGCATAACTCTC |
| 2241 | CAGCTGCCCTGCTGAGGCTG | 3365 | ATATCAATTCCTCGAAGGCA | 4490 | TAATGATGCTGCATAACTCT |
| 2242 | CCAGCTGCCCTGCTGAGGCT | 3366 | CATATCAATTCCTCGAAGGC | 4491 | GTAATGATGCTGCATAACTC |
| 2243 | ACCAGCTGCCCTGCTGAGGC | 3367 | CCATATCAATTCCTCGAAGG | 4492 | TGTAATGATGCTGCATAACT |
| 2244 | CACCAGCTGCCCTGCTGAGG | 3368 | CCCATATCAATTCCTCGAAG | 4493 | TTGTAATGATGCTGCATAAC |
| 2245 | GCACCAGCTGCCCTGCTGAG | 3369 | TCCCATATCAATTCCTCGAA | 4494 | ATTGTAATGATGCTGCATAA |
| 2246 | AGCACCAGCTGCCCTGCTGA | 3370 | CTCCCATATCAATTCCTCGA | 4495 | GATTGTAATGATGCTGCATA |
| 2247 | GAGCACCAGCTGCCCTGCTG | 3371 | CCTCCCATATCAATTCCTCG | 4496 | TGATTGTAATGATGCTGCAT |
| 2248 | CGAGCACCAGCTGCCCTGCT | 3372 | CCCTCCCATATCAATTCCTC | 4497 | CTGATTGTAATGATGCTGCA |
| 2249 | ACGAGCACCAGCTGCCCTGC | 3373 | ACCCTCCCATATCAATTCCT | 4498 | ACTGATTGTAATGATGCTGC |
| 2250 | GACGAGCACCAGCTGCCCTG | 3374 | CACCCTCCCATATCAATTCC | 4499 | AACTGATTGTAATGATGCTG |
| 2251 | CGACGAGCACCAGCTGCCCT | 3375 | TCACCCTCCCATATCAATTC | 4500 | AAACTGATTGTAATGATGCT |
| 2252 | GCGACGAGCACCAGCTGCCC | 3376 | CTCACCCTCCCATATCAATT | 4501 | TAAACTGATTGTAATGATGC |
| 2253 | GGCGACGAGCACCAGCTGCC | 3377 | CCTCACCCTCCCATATCAAT | 4502 | TTAAACTGATTGTAATGATG |
| 2254 | AGGCGACGAGCACCAGCTGC | 3378 | TCCTCACCCTCCCATATCAA | 4503 | CTTAAACTGATTGTAATGAT |
| 2255 | AAGGCGACGAGCACCAGCTG | 3379 | CTCCTCACCCTCCCATATCA | 4504 | TCTTAAACTGATTGTAATGA |
| 2256 | GAAGGCGACGAGCACCAGCT | 3380 | TCTCCTCACCCTCCCATATC | 4505 | GTCTTAAACTGATTGTAATG |
| 2257 | GGAAGGCGACGAGCACCAGC | 3381 | CTCTCCTCACCCTCCCATAT | 4506 | GGTCTTAAACTGATTGTAAT |
| 2258 | AGGAAGGCGACGAGCACCAG | 3382 | TCTCTCCTCACCCTCCCATA | 4507 | TGGTCTTAAACTGATTGTAA |
| 2259 | AAGGAAGGCGACGAGCACCA | 3383 | TTCTCTCCTCACCCTCCCAT | 4508 | ATGGTCTTAAACTGATTGTA |
| 2260 | TAAGGAAGGCGACGAGCACC | 3384 | TTTCTCTCCTCACCCTCCCA | 4509 | AATGGTCTTAAACTGATTGT |
| 2261 | TTAAGGAAGGCGACGAGCAC | 3385 | TTTTCTCTCCTCACCCTCCC | 4510 | AAATGGTCTTAAACTGATTG |
| 2262 | GTTAAGGAAGGCGACGAGCA | 3386 | ATTTTCTCTCCTCACCCTCC | 4511 | AAAATGGTCTTAAACTGATT |
| 2263 | GGTTAAGGAAGGCGACGAGC | 3387 | CATTTTCTCTCCTCACCCTC | 4512 | AAAAATGGTCTTAAACTGAT |
| 2264 | GGGTTAAGGAAGGCGACGAG | 3388 | ACATTTTCTCTCCTCACCCT | 4513 | TAAAAATGGTCTTAAACTGA |
| 2265 | TGGGTTAAGGAAGGCGACGA | 3389 | TACATTTTCTCTCCTCACCC | 4514 | ATAAAAATGGTCTTAAACTG |
| 2266 | ATGGGTTAAGGAAGGCGACG | 3390 | GTACATTTTCTCTCCTCACC | 4515 | GATAAAAATGGTCTTAAACT |
| 2267 | GATGGGTTAAGGAAGGCGAC | 3391 | GGTACATTTTCTCTCCTCAC | 4516 | TGATAAAAATGGTCTTAAAC |
| 2268 | GGATGGGTTAAGGAAGGCGA | 3392 | TGGTACATTTTCTCTCCTCA | 4517 | GTGATAAAAATGGTCTTAAA |
| 2269 | AGGATGGGTTAAGGAAGGCG | 3393 | GTGGTACATTTTCTCTCCTC | 4518 | GGTGATAAAAATGGTCTTAA |
| 2270 | CAGGATGGGTTAAGGAAGGC | 3394 | TGTGGTACATTTTCTCTCCT | 4519 | TGGTGATAAAAATGGTCTTA |
| 2271 | GCAGGATGGGTTAAGGAAGG | 3395 | CTGTGGTACATTTTCTCTCC | 4520 | GTGGTGATAAAAATGGTCTT |
| 2272 | TGCAGGATGGGTTAAGGAAG | 3396 | TCTGTGGTACATTTTCTCTC | 4521 | TGTGGTGATAAAAATGGTCT |
| 2273 | CTGCAGGATGGGTTAAGGAA | 3397 | TTCTGTGGTACATTTTCTCT | 4522 | CTGTGGTGATAAAAATGGTC |
| 2274 | CCTGCAGGATGGGTTAAGGA | 3398 | GTTCTGTGGTACATTTTCTC | 4523 | TCTGTGGTGATAAAAATGGT |
| 2275 | GCCTGCAGGATGGGTTAAGG | 3399 | TGTTCTGTGGTACATTTTCT | 4524 | TTCTGTGGTGATAAAAATGG |
| 2276 | CGCCTGCAGGATGGGTTAAG | 3400 | CTGTTCTGTGGTACATTTTC | 4525 | CTTCTGTGGTGATAAAAATG |
| 2277 | GCGCCTGCAGGATGGGTTAA | 3401 | TCTGTTCTGTGGTACATTTT | 4526 | CCTTCTGTGGTGATAAAAAT |
| 2278 | GGCGCCTGCAGGATGGGTTA | 3402 | ATCTGTTCTGTGGTACATTT | 4527 | GCCTTCTGTGGTGATAAAAA |
| 2279 | AGGCGCCTGCAGGATGGGTT | 3403 | AATCTGTTCTGTGGTACATT | 4528 | TGCCTTCTGTGGTGATAAAA |
| 2280 | CAGGCGCCTGCAGGATGGGT | 3404 | TAATCTGTTCTGTGGTACAT | 4529 | CTGCCTTCTGTGGTGATAAA |
| 2281 | CCAGGCGCCTGCAGGATGGG | 3405 | CTAATCTGTTCTGTGGTACA | 4530 | GCTGCCTTCTGTGGTGATAA |
| 2282 | CCCAGGCGCCTGCAGGATGG | 3406 | GCTAATCTGTTCTGTGGTAC | 4531 | GGCTGCCTTCTGTGGTGATA |
| 2283 | CCCCAGGCGCCTGCAGGATG | 3407 | GGCTAATCTGTTCTGTGGTA | 4532 | AGGCTGCCTTCTGTGGTGAT |
| 2284 | CCCCCAGGCGCCTGCAGGAT | 3408 | TGGCTAATCTGTTCTGTGGT | 4533 | AAGGCTGCCTTCTGTGGTGA |
| 2285 | TCCCCCAGGCGCCTGCAGGA | 3409 | CTGGCTAATCTGTTCTGTGG | 4534 | TAAGGCTGCCTTCTGTGGTG |
| 2286 | CTCCCCCAGGCGCCTGCAGG | 3410 | ACTGGCTAATCTGTTCTGTG | 4535 | ATAAGGCTGCCTTCTGTGGT |
| 2287 | ACTCCCCCAGGCGCCTGCAG | 3411 | CACTGGCTAATCTGTTCTGT | 4536 | CATAAGGCTGCCTTCTGTGG |
| 2288 | AACTCCCCCAGGCGCCTGCA | 3412 | TCACTGGCTAATCTGTTCTG | 4537 | ACATAAGGCTGCCTTCTGTG |
| 2289 | AAACTCCCCCAGGCGCCTGC | 3413 | GTCACTGGCTAATCTGTTCT | 4538 | GACATAAGGCTGCCTTCTGT |
| 2290 | CAAACTCCCCCAGGCGCCTG | 3414 | TGTCACTGGCTAATCTGTTC | 4539 | GGACATAAGGCTGCCTTCTG |
| 2291 | GCAAACTCCCCCAGGCGCCT | 3415 | TTGTCACTGGCTAATCTGTT | 4540 | AGGACATAAGGCTGCCTTCT |
| 2292 | AGCAAACTCCCCCAGGCGCC | 3416 | CTTGTCACTGGCTAATCTGT | 4541 | AAGGACATAAGGCTGCCTTC |
| 2293 | TAGCAAACTCCCCCAGGCGC | 3417 | TCTTGTCACTGGCTAATCTG | 4542 | AAAGGACATAAGGCTGCCTT |
| 2294 | CTAGCAAACTCCCCCAGGCG | 3418 | CTCTTGTCACTGGCTAATCT | 4543 | TAAAGGACATAAGGCTGCCT |
| 2295 | TCTAGCAAACTCCCCCAGGC | 3419 | ACTCTTGTCACTGGCTAATC | 4544 | CTAAAGGACATAAGGCTGCC |
| 2296 | CTCTAGCAAACTCCCCCAGG | 3420 | GACTCTTGTCACTGGCTAAT | 4545 | GCTAAAGGACATAAGGCTGC |
| 2297 | TCTCTAGCAAACTCCCCCAG | 3421 | TGACTCTTGTCACTGGCTAA | 4546 | TGCTAAAGGACATAAGGCTG |
| 2298 | ATCTCTAGCAAACTCCCCCA | 3422 | CTGACTCTTGTCACTGGCTA | 4547 | CTGCTAAAGGACATAAGGCT |
| 2299 | CATCTCTAGCAAACTCCCCC | 3423 | GCTGACTCTTGTCACTGGCT | 4548 | ACTGCTAAAGGACATAAGGC |
| 2300 | TCATCTCTAGCAAACTCCCC | 3424 | GGCTGACTCTTGTCACTGGC | 4549 | GACTGCTAAAGGACATAAGG |
| 2301 | ATCATCTCTAGCAAACTCCC | 3425 | AGGCTGACTCTTGTCACTGG | 4550 | TGACTGCTAAAGGACATAAG |
| 2302 | TATCATCTCTAGCAAACTCC | 3426 | CAGGCTGACTCTTGTCACTG | 4551 | GTGACTGCTAAAGGACATAA |
| 2303 | CTATCATCTCTAGCAAACTC | 3427 | GCAGGCTGACTCTTGTCACT | 4552 | GGTGACTGCTAAAGGACATA |
| 2304 | GCTATCATCTCTAGCAAACT | 3428 | AGCAGGCTGACTCTTGTCAC | 4553 | GGGTGACTGCTAAAGGACAT |
| 2305 | CGCTATCATCTCTAGCAAAC | 3429 | AAGCAGGCTGACTCTTGTCA | 4554 | AGGGTGACTGCTAAAGGACA |
| 2306 | GCGCTATCATCTCTAGCAAA | 3430 | CAAGCAGGCTGACTCTTGTC | 4555 | GAGGGTGACTGCTAAAGGAC |
| 2307 | CGCGCTATCATCTCTAGCAA | 3431 | CCAAGCAGGCTGACTCTTGT | 4556 | GGAGGGTGACTGCTAAAGGA |
| 2308 | ACGCGCTATCATCTCTAGCA | 3432 | ACCAAGCAGGCTGACTCTTG | 4557 | GGGAGGGTGACTGCTAAAGG |
| 2309 | CACGCGCTATCATCTCTAGC | 3433 | CACCAAGCAGGCTGACTCTT | 4558 | AGGGAGGGTGACTGCTAAAG |
| 2310 | ACACGCGCTATCATCTCTAG | 3434 | GCACCAAGCAGGCTGACTCT | 4559 | TAGGGAGGGTGACTGCTAAA |
| 2311 | GACACGCGCTATCATCTCTA | 3435 | GGCACCAAGCAGGCTGACTC | 4560 | TTAGGGAGGGTGACTGCTAA |
| 2312 | AGACACGCGCTATCATCTCT | 3436 | TGGCACCAAGCAGGCTGACT | 4561 | GTTAGGGAGGGTGACTGCTA |
| 2313 | CAGACACGCGCTATCATCTC | 3437 | TTGGCACCAAGCAGGCTGAC | 4562 | GGTTAGGGAGGGTGACTGCT |
| 2314 | CCAGACACGCGCTATCATCT | 3438 | TTTGGCACCAAGCAGGCTGA | 4563 | GGGTTAGGGAGGGTGACTGC |
| 2315 | CCCAGACACGCGCTATCATC | 3439 | CTTTGGCACCAAGCAGGCTG | 4564 | AGGGTTAGGGAGGGTGACTG |
| 2316 | CCCCAGACACGCGCTATCAT | 3440 | CCTTTGGCACCAAGCAGGCT | 4565 | TAGGGTTAGGGAGGGTGACT |
| 2317 | GCCCCAGACACGCGCTATCA | 3441 | CCCTTTGGCACCAAGCAGGC | 4566 | CTAGGGTTAGGGAGGGTGAC |
| 2318 | TGCCCCAGACACGCGCTATC | 3442 | GCCCTTTGGCACCAAGCAGG | 4567 | CCTAGGGTTAGGGAGGGTGA |
| 2319 | ATGCCCCAGACACGCGCTAT | 3443 | GGCCCTTTGGCACCAAGCAG | 4568 | GCCTAGGGTTAGGGAGGGTG |
| 2320 | AATGCCCCAGACACGCGCTA | 3444 | AGGCCCTTTGGCACCAAGCA | 4569 | TGCCTAGGGTTAGGGAGGGT |
| 2321 | CAATGCCCCAGACACGCGCT | 3445 | CAGGCCCTTTGGCACCAAGC | 4739 | TTTTTTTTTTGGACTTGGGAG |
| | | | | | TGGTGACTG |
| 2322 | TCAATGCCCCAGACACGCGC | 3446 | CCAGGCCCTTTGGCACCAAG | 4740 | TTTTTTTTTTGGACTTGGGAGT |
| | | | | | GGTGACTG |
| 2323 | GTCAATGCCCCAGACACGCG | 3447 | CCCAGGCCCTTTGGCACCAA | 4741 | GGGTGCCACCTAGTGGAAGA |
| 2324 | TGTCAATGCCCCAGACACGC | 3448 | GCCCAGGCCCTTTGGCACCA | 4742 | TGGGGGGTGCCACCTAGTGG |
| 2325 | CTGTCAATGCCCCAGACACG | 3449 | GGCCCAGGCCCTTTGGCACC | 4570 | TCGGAGTTGGGGGGTGCCAC |
| 2326 | ACTGTCAATGCCCCAGACAC | 3450 | TGGCCCAGGCCCTTTGGCAC | 4571 | GGCACTCGGAGTTGGGGGGT |
| 2327 | CACTGTCAATGCCCCAGACA | 3451 | CTGGCCCAGGCCCTTTGGCA | 4572 | TCCTCTCCCCTTGGCACTCG |
| 2328 | GCACTGTCAATGCCCCAGAC | 3452 | CCTGGCCCAGGCCCTTTGGC | 4573 | GAATTTCCTCTCCCCTTGGC |
| 2329 | CGCACTGTCAATGCCCCAGA | 3453 | GCCTGGCCCAGGCCCTTTGG | 4574 | TTTTGGGAATTTCCTCTCCC |
| 2330 | TCGCACTGTCAATGCCCCAG | 3454 | TGCCTGGCCCAGGCCCTTTG | 4575 | GCTCCCCTTTTGGGAATTTC |
| 2331 | CTCGCACTGTCAATGCCCCA | 3455 | CTGCCTGGCCCAGGCCCTTT | 4576 | TGAGACCTTGGCTTCTCGAA |
| 2332 | CCTCGCACTGTCAATGCCCC | 3456 | TCTGCCTGGCCCAGGCCCTT | 4577 | TGGGAACGAGACCTGAGACC |
| 2333 | CCCTCGCACTGTCAATGCCC | 3457 | CTCTGCCTGGCCCAGGCCCT | 4578 | CGAGGGCCTGGGAACGAGAC |
| 2334 | TCCCTCGCACTGTCAATGCC | 3458 | TCTCTGCCTGGCCCAGGCCC | 4579 | CTCTCCTGGTGGTGGTGGGT |
| 2335 | CTCCCTCGCACTGTCAATGC | 3459 | ATCTCTGCCTGGCCCAGGCC | 4580 | TCCCCTCTCCTGGTGGTGGT |
| 2336 | ACTCCCTCGCACTGTCAATG | 3460 | CATCTCTGCCTGGCCCAGGC | 4581 | TTCTTCCCCTCTCCTGGTGG |
| 2337 | CACTCCCTCGCACTGTCAAT | 3461 | CCATCTCTGCCTGGCCCAGG | 4582 | GCTGGCTTCTTCCCCTCTCC |
| 2338 | ACACTCCCTCGCACTGTCAA | 3462 | TCCATCTCTGCCTGGCCCAG | 4583 | CTGTCGGTAGGTGCTGGCTT |
| 2339 | AACACTCCCTCGCACTGTCA | 3463 | ATCCATCTCTGCCTGGCCCA | 4584 | AGCTCCACCCCTGTCGGTAG |
| 2340 | TAACACTCCCTCGCACTGTC | 3464 | CATCCATCTCTGCCTGGCCC | 4585 | ACCCAGCTCCACCCCTGTCG |
| 2341 | ATAACACTCCCTCGCACTGT | 3465 | TCATCCATCTCTGCCTGGCC | 4586 | CTTGACCCAGCTCCACCCCT |
| 2342 | CATAACACTCCCTCGCACTG | 3466 | ATCATCCATCTCTGCCTGGC | 4587 | GGAGTCTCAGCCGGAGACAA |
| 2343 | TCATAACACTCCCTCGCACT | 3467 | CATCATCCATCTCTGCCTGG | 4588 | GAGGTTCCCCTGGAGTCTCA |
| 2344 | TTCATAACACTCCCTCGCAC | 3468 | CCATCATCCATCTCTGCCTG | 4589 | GCTTGAGGTTCCCCTGGAGT |
| 2345 | ATTCATAACACTCCCTCGCA | 3469 | CCCATCATCCATCTCTGCCT | 4590 | GTGAGCTTGAGGTTCCCCTG |
| 2346 | AATTCATAACACTCCCTCGC | 3470 | TCCCATCATCCATCTCTGCC | 4591 | CGCCAGGGCCATGTGAGCTT |
| 2347 | CAATTCATAACACTCCCTCG | 3471 | CTCCCATCATCCATCTCTGC | 4592 | GGCCCGCCAGGGCCATGTGA |
| 2348 | CCAATTCATAACACTCCCTC | 3472 | TCTCCCATCATCCATCTCTG | 4593 | CAGGGGCCCGCCAGGGCCAT |
| 2349 | CCCAATTCATAACACTCCCT | 3473 | ATCTCCCATCATCCATCTCT | 4594 | TGCCCAGGGGCCCGCCAGGG |
| 2350 | TCCCAATTCATAACACTCCC | 3474 | CATCTCCCATCATCCATCTC | 4595 | TGCTCCTGCCCAGGGGCCCG |
| 2351 | TTCCCAATTCATAACACTCC | 3475 | CCATCTCCCATCATCCATCT | 4596 | GGATGGGTTAAGGAAGGCGA |
| 2352 | ATTCCCAATTCATAACACTC | 3476 | CCCATCTCCCATCATCCATC | 4597 | AGGCGCCTGCAGGATGGGTT |
| 2353 | TATTCCCAATTCATAACACT | 3477 | GCCCATCTCCCATCATCCAT | 4598 | CCCCAGGCGCCTGCAGGATG |
| 2354 | ATATTCCCAATTCATAACAC | 3478 | GGCCCATCTCCCATCATCCA | 4599 | AACTCCCCCAGGCGCCTGCA |
| 2355 | AATATTCCCAATTCATAACA | 3479 | TGGCCCATCTCCCATCATCC | 4600 | GCGCTATCATCTCTAGCAAA |
| 2356 | AAATATTCCCAATTCATAAC | 3480 | CTGGCCCATCTCCCATCATC | 4601 | TCTGCCTGGCCCAGGCCCTT |
| 2357 | CAAATATTCCCAATTCATAA | 3481 | CCTGGCCCATCTCCCATCAT | 4602 | ATCCATCTCTGCCTGGCCCA |
| 2358 | ACAAATATTCCCAATTCATA | 3482 | TCCTGGCCCATCTCCCATCA | 4603 | TCTCCCATCATCCATCTCTG |
| 2359 | CACAAATATTCCCAATTCAT | 3483 | CTCCTGGCCCATCTCCCATC | 4604 | CCCATCTCCCATCATCCATC |
| 2360 | GCACAAATATTCCCAATTCA | 3484 | TCTCCTGGCCCATCTCCCAT | 4605 | TCTCTCCTGGCCCATCTCCC |
| 2361 | AGCACAAATATTCCCAATTC | 3485 | CTCTCCTGGCCCATCTCCCA | 4606 | GGGCCTCTCCTCTCTCCTGG |
| 2362 | GAGCACAAATATTCCCAATT | 3486 | TCTCTCCTGGCCCATCTCCC | 4607 | TCCCTGGGCCTCTCCTCTCT |
| 2363 | CGAGCACAAATATTCCCAAT | 3487 | CTCTCTCCTGGCCCATCTCC | 4608 | GCTTTCCCTGGGCCTCTCCT |
| 2364 | GCGAGCACAAATATTCCCAA | 3488 | CCTCTCTCCTGGCCCATCTC | 4609 | GTGCAGACACTGCCGTTCCT |
| 2365 | GGCGAGCACAAATATTCCCA | 3489 | TCCTCTCTCCTGGCCCATCT | 4610 | CCCCTGTGCAGACACTGCCG |
| 2366 | AGGCGAGCACAAATATTCCC | 3490 | CTCCTCTCTCCTGGCCCATC | 4611 | CCATCCCCTGTGCAGACACT |
| 2367 | AAGGCGAGCACAAATATTCC | 3491 | TCTCCTCTCTCCTGGCCCAT | 4612 | AGTCTCCATCCCCTGTGCAG |
| 2368 | AAAGGCGAGCACAAATATTC | 3492 | CTCTCCTCTCTCCTGGCCCA | 4613 | CTTGCTCAGGCTGCAGCAGT |
| 2369 | GAAAGGCGAGCACAAATATT | 3493 | CCTCTCCTCTCTCCTGGCCC | 4614 | GTTCCTTGCTCAGGCTGCAG |
| 2370 | AGAAAGGCGAGCACAAATAT | 3494 | GCCTCTCCTCTCTCCTGGCC | 4615 | TCAGCTCCAGTTCCTTGCTC |
| 2371 | TAGAAAGGCGAGCACAAATA | 3495 | GGCCTCTCCTCTCTCCTGGC | 4616 | GGGTGCCACCTAGTGGAAGA |
| 2372 | ATAGAAAGGCGAGCACAAAT | 3496 | GGGCCTCTCCTCTCTCCTGG | 4617 | TGGGGGGTGCCACCTAGTGG |
| 2373 | GATAGAAAGGCGAGCACAAA | 3497 | TGGGCCTCTCCTCTCTCCTG | 4618 | TCGGAGTTGGGGGGTGCCAC |
| 2374 | GGATAGAAAGGCGAGCACAA | 3498 | CTGGGCCTCTCCTCTCTCCT | 4619 | GGCACTCGGAGTTGGGGGGT |
| 2375 | AGGATAGAAAGGCGAGCACA | 3499 | CCTGGGCCTCTCCTCTCTCC | 4620 | TCCTCTCCCCTTGGCACTCG |
| 2376 | AAGGATAGAAAGGCGAGCAC | 3500 | CCCTGGGCCTCTCCTCTCTC | 4621 | GAATTTCCTCTCCCCTTGGC |
| 2377 | AAAGGATAGAAAGGCGAGCA | 3501 | TCCCTGGGCCTCTCCTCTCT | 4622 | TTTTGGGAATTTCCTCTCCC |
| 2378 | AAAAGGATAGAAAGGCGAGC | 3502 | TTCCCTGGGCCTCTCCTCTC | 4623 | GCTCCCCTTTTGGGAATTTC |
| 2379 | CAAAAGGATAGAAAGGCGAG | 3503 | TTTCCCTGGGCCTCTCCTCT | 4624 | TGAGACCTTGGCTTCTCGAA |
| 2380 | ACAAAAGGATAGAAAGGCGA | 3504 | CTTTCCCTGGGCCTCTCCTC | 4625 | TGGGAACGAGACCTGAGACC |
| 2381 | AACAAAAGGATAGAAAGGCG | 3505 | GCTTTCCCTGGGCCTCTCCT | 4626 | CGAGGGCCTGGGAACGAGAC |
| 2382 | AAACAAAAGGATAGAAAGGC | 3506 | GGCTTTCCCTGGGCCTCTCC | 4627 | CTCTCCTGGTGGTGGTGGGT |
| 2383 | CAAACAAAAGGATAGAAAGG | 3507 | AGGCTTTCCCTGGGCCTCTC | 4628 | TCCCCTCTCCTGGTGGTGGT |
| 2384 | ACAAACAAAAGGATAGAAAG | 3508 | CAGGCTTTCCCTGGGCCTCT | 4629 | TTCTTCCCCTCTCCTGGTGG |
| 2385 | AACAAACAAAAGGATAGAAA | 3509 | TCAGGCTTTCCCTGGGCCTC | 4630 | GCTGGCTTCTTCCCCTCTCC |
| 2386 | AAACAAACAAAAGGATAGAA | 3510 | ATCAGGCTTTCCCTGGGCCT | 4631 | CTGTCGGTAGGTGCTGGCTT |
| 2387 | CAAACAAACAAAAGGATAGA | 3511 | TATCAGGCTTTCCCTGGGCC | 4632 | AGCTCCACCCCTGTCGGTAG |
| 2388 | ACAAACAAACAAAAGGATAG | 3512 | GTATCAGGCTTTCCCTGGGC | 4633 | ACCCAGCTCCACCCCTGTCG |
| 2389 | AACAAACAAACAAAAGGATA | 3513 | AGTATCAGGCTTTCCCTGGG | 4634 | CTTGACCCAGCTCCACCCCT |
| 2390 | GAACAAACAAACAAAAGGAT | 3514 | CAGTATCAGGCTTTCCCTGG | 4635 | GGAGTCTCAGCCGGAGACAA |
| 2391 | AGAACAAACAAACAAAAGGA | 3515 | CCAGTATCAGGCTTTCCCTG | 4636 | GAGGTTCCCCTGGAGTCTCA |
| 2392 | CAGAACAAACAAACAAAAGG | 3516 | CCCAGTATCAGGCTTTCCCT | 4637 | GCTTGAGGTTCCCCTGGAGT |
| 2393 | TCAGAACAAACAAACAAAAG | 3517 | GCCCAGTATCAGGCTTTCCC | 4638 | GTGAGCTTGAGGTTCCCCTG |
| 2394 | CTCAGAACAAACAAACAAAA | 3518 | GGCCCAGTATCAGGCTTTCC | 4639 | CGCCAGGGCCATGTGAGCTT |
| 2395 | TCTCAGAACAAACAAACAAA | 3519 | CGGCCCAGTATCAGGCTTTC | 4640 | GGCCCGCCAGGGCCATGTGA |
| 2396 | GTCTCAGAACAAACAAACAA | 3520 | ACGGCCCAGTATCAGGCTTT | 4641 | CAGGGGCCCGCCAGGGCCAT |
| 2397 | CGTCTCAGAACAAACAAACA | 3521 | CACGGCCCAGTATCAGGCTT | 4642 | TGCCCAGGGGCCCGCCAGGG |
| 2398 | CCGTCTCAGAACAAACAAAC | 3522 | CCACGGCCCAGTATCAGGCT | 4643 | TGCTCCTGCCCAGGGGCCCG |
| 2399 | TCCGTCTCAGAACAAACAAA | 3523 | TCCACGGCCCAGTATCAGGC | 4644 | GGATGGGTTAAGGAAGGCGA |
| 2400 | CTCCGTCTCAGAACAAACAA | 3524 | CTCCACGGCCCAGTATCAGG | 4645 | AGGCGCCTGCAGGATGGGTT |
| 2401 | ACTCCGTCTCAGAACAAACA | 3525 | CCTCCACGGCCCAGTATCAG | 4646 | CCCCAGGCGCCTGCAGGATG |
| 2402 | GACTCCGTCTCAGAACAAAC | 3526 | TCCTCCACGGCCCAGTATCA | 4647 | AACTCCCCCAGGCGCCTGCA |
| 2403 | AGACTCCGTCTCAGAACAAA | 3527 | TTCCTCCACGGCCCAGTATC | 4648 | GCGCTATCATCTCTAGCAAA |
| 2404 | GAGACTCCGTCTCAGAACAA | 3528 | GTTCCTCCACGGCCCAGTAT | 4649 | TCTGCCTGGCCCAGGCCCTT |
| 2405 | TGAGACTCCGTCTCAGAACA | 3529 | CGTTCCTCCACGGCCCAGTA | 4650 | ATCCATCTCTGCCTGGCCCA |
| 2406 | GTGAGACTCCGTCTCAGAAC | 3530 | CCGTTCCTCCACGGCCCAGT | 4651 | TCTCCCATCATCCATCTCTG |
| 2407 | AGTGAGACTCCGTCTCAGAA | 3531 | GCCGTTCCTCCACGGCCCAG | 4652 | CCCATCTCCCATCATCCATC |
| 2408 | GAGTGAGACTCCGTCTCAGA | 3532 | TGCCGTTCCTCCACGGCCCA | 4653 | TCTCTCCTGGCCCATCTCCC |
| 2409 | AGAGTGAGACTCCGTCTCAG | 3533 | CTGCCGTTCCTCCACGGCCC | 4654 | GGGCCTCTCCTCTCTCCTGG |
| 2410 | CAGAGTGAGACTCCGTCTCA | 3534 | ACTGCCGTTCCTCCACGGCC | 4655 | TCCCTGGGCCTCTCCTCTCT |
| 2411 | ACAGAGTGAGACTCCGTCTC | 3535 | CACTGCCGTTCCTCCACGGC | 4656 | GCTTTCCCTGGGCCTCTCCT |
| 2412 | GACAGAGTGAGACTCCGTCT | 3536 | ACACTGCCGTTCCTCCACGG | 4657 | GTGCAGACACTGCCGTTCCT |
| 2413 | CGACAGAGTGAGACTCCGTC | 3537 | GACACTGCCGTTCCTCCACG | 4658 | CCCCTGTGCAGACACTGCCG |
| 2414 | GCGACAGAGTGAGACTCCGT | 3538 | AGACACTGCCGTTCCTCCAC | 4659 | CCATCCCCTGTGCAGACACT |
| 2415 | GGCGACAGAGTGAGACTCCG | 3539 | CAGACACTGCCGTTCCTCCA | 4660 | AGTCTCCATCCCCTGTGCAG |
| 2416 | TGGCGACAGAGTGAGACTCC | 3540 | GCAGACACTGCCGTTCCTCC | 4661 | CTTGCTCAGGCTGCAGCAGT |
| 2417 | CTGGCGACAGAGTGAGACTC | 3541 | TGCAGACACTGCCGTTCCTC | 4662 | GTTCCTTGCTCAGGCTGCAG |
| 2418 | CCTGGCGACAGAGTGAGACT | 3542 | GTGCAGACACTGCCGTTCCT | 4663 | TCAGCTCCAGTTCCTTGCTC |
| 2419 | GCCTGGCGACAGAGTGAGAC | 3543 | TGTGCAGACACTGCCGTTCC | 4664 | GGTTGGCTCCCCTTTTGGGA |
| 2420 | AGCCTGGCGACAGAGTGAGA | 3544 | CTGTGCAGACACTGCCGTTC | 4665 | GCCACTTTTTCCTGCTCATT |
| 2421 | CAGCCTGGCGACAGAGTGAG | 3545 | CCTGTGCAGACACTGCCGTT | 4666 | CTCCGAGGGCCTGGGAACGA |
| 2422 | CCAGCCTGGCGACAGAGTGA | 3546 | CCCTGTGCAGACACTGCCGT | 4667 | AGCCGGAGGGGCGCGCGACC |
| 2423 | TCCAGCCTGGCGACAGAGTG | 3547 | CCCCTGTGCAGACACTGCCG | 4668 | TGGGTGGTTCCCGCGGCGGC |
| 2424 | CTCCAGCCTGGCGACAGAGT | 3548 | TCCCCTGTGCAGACACTGCC | 4669 | AAGCAGGGACCACACCATTC |
| 2425 | ACTCCAGCCTGGCGACAGAG | 3549 | ATCCCCTGTGCAGACACTGC | 4670 | GAAGGGGCTTTCTACCTCCC |
| 2426 | CACTCCAGCCTGGCGACAGA | 3550 | CATCCCCTGTGCAGACACTG | 4671 | AGTAATTGCAGTGACGCCCC |
| 2427 | GCACTCCAGCCTGGCGACAG | 3551 | CCATCCCCTGTGCAGACACT | 4672 | TCTGATACACTAGGGGGAGT |
| 2428 | TGCACTCCAGCCTGGCGACA | 3552 | TCCATCCCCTGTGCAGACAC | 4673 | GAACCGCTTACTGAAACTCC |
| 2429 | CTGCACTCCAGCCTGGCGAC | 3553 | CTCCATCCCCTGTGCAGACA | 4674 | GCCGCGCAGACCTCTCGCCT |
| 2430 | ACTGCACTCCAGCCTGGCGA | 3554 | TCTCCATCCCCTGTGCAGAC | 4675 | CAAGGACCGCGGAGTCGGAC |
| 2431 | CACTGCACTCCAGCCTGGCG | 3555 | GTCTCCATCCCCTGTGCAGA | 4676 | AGTCTGAGCGCTACCCGGTT |
| 2432 | CCACTGCACTCCAGCCTGGC | 3556 | AGTCTCCATCCCCTGTGCAG | 4677 | AGGTAGGCGGGTCATCGCGC |
| 2433 | GCCACTGCACTCCAGCCTGG | 3557 | CAGTCTCCATCCCCTGTGCA | 4678 | AGCGGGTAGCCCTGATCCCT |
| 2434 | TGCCACTGCACTCCAGCCTG | 3558 | GCAGTCTCCATCCCCTGTGC | 4679 | CCTCTATATTGATAAGTAGC |
| 2435 | GTGCCACTGCACTCCAGCCT | 3559 | AGCAGTCTCCATCCCCTGTG | 4680 | GAGTGATTTGAGTAGAAAAG |
| 2436 | CGTGCCACTGCACTCCAGCC | 3560 | CAGCAGTCTCCATCCCCTGT | 4681 | GATCCCTAGAAATGGGGTGT |
| 2437 | TCGTGCCACTGCACTCCAGC | 3561 | GCAGCAGTCTCCATCCCCTG | 4682 | CGACGTCACATGATTCTCCA |
| 2438 | ATCGTGCCACTGCACTCCAG | 3562 | TGCAGCAGTCTCCATCCCCT | 4683 | TAAGGAAGGCGACGAGCACC |
| 2439 | GATCGTGCCACTGCACTCCA | 3563 | CTGCAGCAGTCTCCATCCCC | 4684 | AATGCCCCAGACACGCGCTA |
| 2440 | AGATCGTGCCACTGCACTCC | 3564 | GCTGCAGCAGTCTCCATCCC | 4685 | AAAGGCGAGCACAAATATTC |
| 2441 | GAGATCGTGCCACTGCACTC | 3565 | GGCTGCAGCAGTCTCCATCC | 4686 | CAGAACAAACAAACAAAAGG |
| 2442 | CGAGATCGTGCCACTGCACT | 3566 | AGGCTGCAGCAGTCTCCATC | 4687 | AACACACAAGTCCGGGCGCG |
| 2443 | CCGAGATCGTGCCACTGCAC | 3567 | CAGGCTGCAGCAGTCTCCAT | 4688 | GTGAGCTATGATCAGCTTGG |
| 2444 | GCCGAGATCGTGCCACTGCA | 3568 | TCAGGCTGCAGCAGTCTCCA | 4689 | AGAATCGCTTTGGGAGCAGG |
| 2445 | AGCCGAGATCGTGCCACTGC | 3569 | CTCAGGCTGCAGCAGTCTCC | 4690 | CATTTGTAATCCCAGCGCCT |
| 2446 | GAGCCGAGATCGTGCCACTG | 3570 | GCTCAGGCTGCAGCAGTCTC | 4691 | AGGAGCGAGCCAGCTCAGTA |
| 2447 | TGAGCCGAGATCGTGCCACT | 3571 | TGCTCAGGCTGCAGCAGTCT | 4692 | GAATAGGGCAGGACAGGACA |
| 2448 | GTGAGCCGAGATCGTGCCAC | 3572 | TTGCTCAGGCTGCAGCAGTC | 4693 | ATGTCAACCGAGTTTGGAGA |
| 2449 | AGTGAGCCGAGATCGTGCCA | 3573 | CTTGCTCAGGCTGCAGCAGT | 4694 | TTCAACTCACTCTGGGGCCT |
| 2450 | CAGTGAGCCGAGATCGTGCC | 3574 | CCTTGCTCAGGCTGCAGCAG | 4695 | GGGCTTTGGGGCTGTTTATC |
| 2451 | GCAGTGAGCCGAGATCGTGC | 3575 | TCCTTGCTCAGGCTGCAGCA | 4696 | AATCCCTGCTCCCTGTCCTG |
| 2452 | TGCAGTGAGCCGAGATCGTG | 3576 | TTCCTTGCTCAGGCTGCAGC | 4697 | ATTAGATTCAGCCTGAGACT |
| 2453 | TTGCAGTGAGCCGAGATCGT | 3577 | GTTCCTTGCTCAGGCTGCAG | 4698 | TACACCTGGCAACTGGCGCA |
| 2454 | GTTGCAGTGAGCCGAGATCG | 3578 | AGTTCCTTGCTCAGGCTGCA | 4699 | CCTGGAGACAATCTACTTCC |
| 2455 | GGTTGCAGTGAGCCGAGATC | 3579 | CAGTTCCTTGCTCAGGCTGC | 4700 | GTGGAATGAAATCTCTTCTT |
| 2456 | AGGTTGCAGTGAGCCGAGAT | 3580 | CCAGTTCCTTGCTCAGGCTG | 4701 | TCAGCTCAAGGAGATGCTCC |
| 2457 | GAGGTTGCAGTGAGCCGAGA | 3581 | TCCAGTTCCTTGCTCAGGCT | 4702 | CTCCACCTGCCAGTTAAAAT |
| 2458 | AGAGGTTGCAGTGAGCCGAG | 3582 | CTCCAGTTCCTTGCTCAGGC | 4703 | CCATCTGGTTTCCCAGGGCT |
| 2459 | CAGAGGTTGCAGTGAGCCGA | 3583 | GCTCCAGTTCCTTGCTCAGG | 4704 | GGCATTGAACATGGCATTCA |
| 2460 | GCAGAGGTTGCAGTGAGCCG | 3584 | AGCTCCAGTTCCTTGCTCAG | 4705 | GGCACCCAGCAGCTCCTGAA |
| 2461 | GGCAGAGGTTGCAGTGAGCC | 3585 | CAGCTCCAGTTCCTTGCTCA | 4706 | CTTCTCTTTCGACAGCCCCC |
| 2462 | AGGCAGAGGTTGCAGTGAGC | 3586 | TCAGCTCCAGTTCCTTGCTC | 4707 | CAGGGCCGATCTGGAGACTA |
| 2463 | GAGGCAGAGGTTGCAGTGAG | 3587 | CTCAGCTCCAGTTCCTTGCT | 4708 | CCTCCCATATCAATTCCTCG |
| 2464 | GGAGGCAGAGGTTGCAGTGA | 3588 | CCTCAGCTCCAGTTCCTTGC | 4709 | TGTCACTGGCTAATCTGTTC |
| 2465 | GGGAGGCAGAGGTTGCAGTG | 3589 | TCCTCAGCTCCAGTTCCTTG | 4710 | TTTGGCACCAAGCAGGCTGA |
| 2466 | CGGGAGGCAGAGGTTGCAGT | 3590 | ATCCTCAGCTCCAGTTCCTT | 4711 | ACGGCCCAGTATCAGGCTTT |
| 2467 | CCGGGAGGCAGAGGTTGCAG | 3591 | CATCCTCAGCTCCAGTTCCT | 4712 | CCTCATCCTCAGCTCCAGTT |
| 2468 | CCCGGGAGGCAGAGGTTGCA | 3592 | TCATCCTCAGCTCCAGTTCC | 4713 | CGAGCTTGGTTAGCCATCCC |
| 2469 | ACCCGGGAGGCAGAGGTTGC | 3593 | CTCATCCTCAGCTCCAGTTC | 4714 | TCCCTCCTCCGACTTCTGCT |
| 2470 | AACCCGGGAGGCAGAGGTTG | 3594 | CCTCATCCTCAGCTCCAGTT | 4715 | ACGACTCCACAGCTCGGTTG |
| 2471 | GAACCCGGGAGGCAGAGGTT | 3595 | GCCTCATCCTCAGCTCCAGT | 4716 | GCTCTAGCTCCAGGCTTAGA |
| 2472 | TGAACCCGGGAGGCAGAGGT | 3596 | TGCCTCATCCTCAGCTCCAG | 4717 | GCCAGGTGTCTTATCCGCTG |
| 2473 | TTGAACCCGGGAGGCAGAGG | 3597 | CTGCCTCATCCTCAGCTCCA | 4718 | TCACCAGGGCACAGACTAGT |
| 2474 | CTTGAACCCGGGAGGCAGAG | 3598 | CCTGCCTCATCCTCAGCTCC | 4719 | ACAGGAAGGAAAATAAGCAC |
| 2475 | GCTTGAACCCGGGAGGCAGA | 3599 | CCCTGCCTCATCCTCAGCTC | 4720 | ACTATACTCCCTAGTCTCAA |
| 2476 | CGCTTGAACCCGGGAGGCAG | 3600 | CCCCTGCCTCATCCTCAGCT | 4721 | GTGTGTGTTTCAATAGAAGC |
| 2477 | TCGCTTGAACCCGGGAGGCA | 3601 | GCCCCTGCCTCATCCTCAGC | 4722 | TGATCGATTCACCTAACATT |
| 2478 | ATCGCTTGAACCCGGGAGGC | 3602 | TGCCCCTGCCTCATCCTCAG | 4723 | TTTTTCTGGTTCTGGGTGGT |
| 2479 | AATCGCTTGAACCCGGGAGG | 3603 | CTGCCCCTGCCTCATCCTCA | 4724 | TTGTTTCAGTCTGTTTAGGT |
| 2480 | GAATCGCTTGAACCCGGGAG | 3604 | CCTGCCCCTGCCTCATCCTC | 4725 | GAATCACGGCTTTGACGATT |
| 2481 | AGAATCGCTTGAACCCGGGA | 3605 | CCCTGCCCCTGCCTCATCCT | 4726 | GTCCCTGGCCGGCAAAATTG |
| 2482 | GAGAATCGCTTGAACCCGGG | 3606 | CCCCTGCCCCTGCCTCATCC | 4727 | GATTGTCTCCAGACACTCCT |
| 2483 | GGAGAATCGCTTGAACCCGG | 3607 | CCCCCTGCCCCTGCCTCATC | 4728 | ACCAGATGCCAGTGTCCCTC |
| 2484 | AGGAGAATCGCTTGAACCCG | 3608 | TCCCCCTGCCCCTGCCTCAT | 4729 | GTGATGTTTAGTGGGATTGC |
| 2485 | CAGGAGAATCGCTTGAACCC | 3609 | ATCCCCCTGCCCCTGCCTCA | 4730 | GTGGGGGATTGTTCTGTGTG |
| 2486 | GCAGGAGAATCGCTTGAACC | 3610 | CATCCCCCTGCCCCTGCCTC | 4731 | GACCTTTTGGGCAGGATACT |
| 2487 | GGCAGGAGAATCGCTTGAAC | 3611 | CCATCCCCCTGCCCCTGCCT | 4732 | AGTAGGTTGTTGAGTCTCAG |
| 2488 | AGGCAGGAGAATCGCTTGAA | 3612 | GCCATCCCCCTGCCCCTGCC | 4733 | ATCGTGGCACCTTACCCTTC |
| 2489 | GAGGCAGGAGAATCGCTTGA | 3613 | AGCCATCCCCCTGCCCCTGC | 4734 | GAGTAGGGAATTACAGACCT |
| 2490 | TGAGGCAGGAGAATCGCTTG | 3614 | TAGCCATCCCCCTGCCCCTG | 4735 | TTGTGTTGGCGGGGGTGGAT |
| 2491 | CTGAGGCAGGAGAATCGCTT | 3615 | TTAGCCATCCCCCTGCCCCT | 4736 | GCATAACTCTCTTAAGACAC |
| 2492 | GCTGAGGCAGGAGAATCGCT | 3616 | GTTAGCCATCCCCCTGCCCC | 4737 | GGCTGCCTTCTGTGGTGATA |
| | | 3617 | GGTTAGCCATCCCCCTGCCC | 4738 | CTAGGGTTAGGGAGGGTGAC |

### Hybridization and AG

[0103] The term “hybridizing” or “hybridizes” as used herein is to be understood as two nucleic acid strands (e.g., an oligonucleotide and a target nucleic acid) forming hydrogen bonds between base pairs on opposite strands thereby forming a duplex. The affinity of the binding between two nucleic acid strands is the strength of the hybridization. It is often described in terms of the melting temperature (Tₘ) defined as the temperature at which half of the oligonucleotides are duplexed with the target nucleic acid. At physiological conditions Tₘ, is not strictly proportional to the affinity (Mergny and Lacroix, 2003, Oligonucleotides 13:515-537). The standard state Gibbs free energy ΔG° is a more accurate representation of binding affinity and is related to the dissociation constant (K_{d}) of the reaction by ΔG°=−RTIn(K_{d}), where R is the gas constant and T is the absolute temperature. Therefore, a very low ΔG° of the reaction between an oligonucleotide and the target nucleic acid reflects a strong hybridization between the oligonucleotide and target nucleic acid. ΔG° is the free energy associated with a reaction where aqueous concentrations are 1M, the pH is 7, and the temperature is 37° C. The hybridization of oligonucleotides to a target nucleic acid is a spontaneous reaction and for spontaneous reactions ΔG° is less than zero. ΔG° can be measured experimentally, for example, by use of the isothermal titration calorimetry (ITC) method as described in Hansen et al., 1965, Chem, Comm. 36-38 and Holdgate et al., 2005, Drug Discov Today. The skilled person will know that commercial equipment is available for ΔG° measurements. ΔG° can also be estimated numerically by using the nearest neighbor model as described by SantaLucia, 1998, Proc Natl Aced Sci USA. 95: 1460-1465 using appropriately derived thermodynamic parameters described by Sugimoto et al., 1995, Biochemistry 34:11211-11216 and McTigue et al., 2004, Biochemistry 43:5388-5405. To have the possibility of modulating its intended nucleic acid target by hybridization, oligonucleotides of the present disclosure hybridize to a target nucleic acid with estimated ΔG° values below −10 kcal/mol for oligonucleotides that are 10-30 nucleotides in length. In some embodiments the degree or strength of hybridization is measured by the standard state Gibbs free energy ΔG°. The oligonucleotides may hybridize to a target nucleic acid with estimated ΔG° values below the range of −10 kcal/mol, such as below −15 kcal/mol, such as below −20 kcal/mol and such as below −25 kcal/mol for oligonucleotides that are 8-30 nucleotides in length. In some embodiments the oligonucleotides hybridize to a target nucleic acid with an estimated ΔG° value of −10 to −60 kcal/mol, such as −12 to −40 kcal/mol, −15 to −30 kcal/mol, −16 to −27 kcal/mol, or −18 to −25 kcal/mol.

### Duplex Region

[0104] The phrase “duplex region” refers to the region in two complementary or substantially complementary polynucleotides that form base pairs with one another, either by Watson-Crick base pairing or any other manner that allows for a stabilized duplex between polynucleotide strands that are complementary or substantially complementary. For example, a polynucleotide strand having 21 nucleotide units can base pair with another polynucleotide of 21 nucleotide units, yet only 19 bases on each strand are complementary or substantially complementary, such that the “duplex region” has 19 base pairs. The remaining bases may, for example, exist as 5′ and 3′ overhangs. Further, within the duplex region, 100% complementarity is not required; substantial complementarity is allowable within a duplex region. Substantial complementarity refers to 70% or greater complementarity. For example, a mismatch in a duplex region consisting of 19 base pairs results in 94.7% complementarity, rendering the duplex region substantially complementary. Duplex regions can be formed by two separate oligonucleotide strands, as well as by single oligonucleotide strands that can form hairpin structures comprising a duplex region.

[0105] A dsRNA includes two RNA strands that are complementary and hybridize to form a duplex structure under conditions in which the dsRNA will be used. One strand of a dsRNA (the antisense strand) includes a region of complementarity that is substantially complementary, and generally fully complementary, to a target sequence. The target sequence can be derived from the sequence of a GRN regRNA, such as an eRNA or paRNA. The other strand (the sense strand) includes a region that is complementary to the antisense strand, such that the two strands hybridize and form a duplex structure when combined under suitable conditions. As described elsewhere herein and as known in the art, the complementary sequences of a dsRNA can also be contained as self-complementary regions of a single nucleic acid molecule, as opposed to being on separate oligonucleotides. Generally, the duplex structure is between 5 and 50 base pairs in length, e.g., between, 5-50, 5-49, 5-48, 5-47, 5-46, 5-45, 5-44, 5-43, 5-42, 5-41, 5-40, 5-39, 5-38, 5-37, 5-36, 5-35, 5-34, 5-33, 5-32, 5-31, 5-30, 5-29, 5-28, 5-27, 5-26, 5-25, 5-24, 5-23, 5-22, 5-21, 5-20, 5-19, 5-18, 5-17, 5-16, 5-15, 5-14, 5-13, 5-12, 5-11, 5-10, 5-9, 5-8, 5-7, 5-6, 6-50, 6-49, 6-48, 6-47, 6-46, 6-45, 6-44, 6-43, 6-42, 6-41, 6-40, 6-39, 6-38, 6-37, 6-36, 6-35, 6-34, 6-33, 6-32, 6-31, 6-30, 6-29, 6-28, 6-27, 6-26, 6-25, 6-24, 6-23, 6-22, 6-21, 6-20, 6-19, 6-18, 6-17, 6-16, 6-15, 6-14, 6-13, 6-12, 6-11, 6-10, 6-9, 6-8, 6-7, 8-50, 8-49, 8-48, 8-47, 8-46, 8-45, 8-44, 8-43, 8-42, 8-41, 8-40, 8-39, 8-38, 8-37, 8-36, 8-35, 8-34, 8-33, 8-32, 8-31, 8-30, 8-29, 8-28, 8-27, 8-26, 8-25, 8-24, 8-23, 8-22, 8-21, 8-20, 8-19, 8-18, 8-17, 8-16, 8-15, 8-14, 8-13, 8-12, 8-11, 8-10, 8-9, 10-50, 10-49, 10-48, 10-47, 10-46, 10-45, 10-44, 10-43, 10-42, 10-41, 10-40, 10-39, 10-38, 10-37, 10-36, 10-35, 10-34, 10-33, 10-32, 10-31, 10-30, 10-29, 10-28, 10-27, 10-26, 10-25, 10-24, 10-23, 10-22, 10-21, 10-20, 10-19, 10-18, 10-17, 10-16, 10-15, 10-14, 10-13, 10-12, 10-11, 10-10, 10-9, 12-50, 12-49, 12-48, 12-47, 12-46, 12-45, 12-44, 12-43, 12-42, 12-41, 12-40, 12-39, 12-38, 12-37, 12-36, 12-35, 12-34, 12-33, 12-32, 12-31, 12-30, 12-29, 12-28, 12-27, 12-26, 12-25, 12-24, 12-23, 12-22, 12-21, 12-20, 12-19, 12-18, 12-17, 12-16, 12-15, 12-14, 12-13, 15-50, 15-49, 15-48, 15-47, 15-46, 15-45, 15-44, 15-43, 15-42, 15-41, 15-40, 15-39, 15-38, 15-37, 15-36, 15-35, 15-34, 15-33, 15-32, 15-31, 15-30, 15-29, 15-28, 15-27, 15-26, 15-25, 15-24, 15-23, 15-22, 15-21, 15-20, 15-19, 15-18, 15-17, 18-50, 18-49, 18-48, 18-47, 18-46, 18-45, 18-44, 18-43, 18-42, 18-41, 18-40, 18-39, 18-38, 18-37, 18-36, 18-35, 18-34, 18-33, 18-32, 18-31, 18-30, 18-30, 18-29, 18-28, 18-27, 18-26, 18-25, 18-24, 18-23, 18-22, 18-21, 18-20, 19-50, 19-49, 19-48, 19-47, 19-46, 19-45, 19-44, 19-43, 19-42, 19-41, 19-40, 19-39, 19-38, 19-37, 19-36, 19-35, 19-34, 19-33, 19-32, 19-31, 19-30, 19-30, 19-29, 19-28, 19-27, 19-26, 19-25, 19-24, 19-23, 19-22, 19-21, 19-20, 20-50, 20-49, 20-48, 20-47, 20-46, 20-45, 20-44, 20-43, 20-42, 20-41, 20-40, 20-39, 20-38, 20-37, 20-36, 20-35, 20-34, 20-33, 20-32, 20-31, 20-30, 20-30, 20-29, 20-28, 20-27, 20-26, 20-25, 20-24, 20-23, 20-22, 20-21, 21-50, 21-49, 21-48, 21-47, 21-46, 21-45, 21-44, 21-43, 21-42, 21-41, 21-40, 21-39, 21-38, 21-37, 21-36, 21-35, 21-34, 21-33, 21-32, 21-31, 21-30, 21-29, 21-28, 21-27, 21-26, 21-25, 21-24, 21-23, 21-22, 22-50, 22-49, 22-48, 22-47, 22-46, 22-45, 22-44, 22-43, 22-42, 22-41, 22-40, 22-39, 22-38, 22-37, 22-36, 22-35, 22-34, 22-33, 22-32, 22-31, 22-30, 22-29, 22-28, 22-27, 22-26, 22-25, 22-24, 22-23, 23-50, 23-49, 23-48, 23-47, 23-46, 23-45, 23-44, 23-43, 23-42, 23-41, 23-40, 23-39, 23-38, 23-37, 23-36, 23-35, 23-34, 23-33, 23-32, 23-31, 23-30, 23-29, 23-28, 23-27, 23-26, 23-25, or 23-24 base pairs in length. Ranges and lengths intermediate to the above recited ranges and lengths are also contemplated to be part of the disclosure.

[0106] Similarly, the region of complementarity to the target sequence can be between 15 and 50 nucleotides in length, e.g., between 5-50, 5-49, 5-48, 5-47, 5-46, 5-45, 5-44, 5-43, 5-42, 5-41, 5-40, 5-39, 5-38, 5-37, 5-36, 5-35, 5-34, 5-33, 5-32, 5-31, 5-30, 5-29, 5-28, 5-27, 5-26, 5-25, 5-24, 5-23, 5-22, 5-21, 5-20, 5-19, 5-18, 5-17, 5-16, 5-15, 5-14, 5-13, 5-12, 5-11, 5-10, 5-9, 5-8, 5-7, 5-6, 6-50, 6-49, 6-48, 6-47, 6-46, 6-45, 6-44, 6-43, 6-42, 6-41, 6-40, 6-39, 6-38, 6-37, 6-36, 6-35, 6-34, 6-33, 6-32, 6-31, 6-30, 6-29, 6-28, 6-27, 6-26, 6-25, 6-24, 6-23, 6-22, 6-21, 6-20, 6-19, 6-18, 6-17, 6-16, 6-15, 6-14, 6-13, 6-12, 6-11, 6-10, 6-9, 6-8, 6-7, 8-50, 8-49, 8-48, 8-47, 8-46, 8-45, 8-44, 8-43, 8-42, 8-41, 8-40, 8-39, 8-38, 8-37, 8-36, 8-35, 8-34, 8-33, 8-32, 8-31, 8-30, 8-29, 8-28, 8-27, 8-26, 8-25, 8-24, 8-23, 8-22, 8-21, 8-20, 8-19, 8-18, 8-17, 8-16, 8-15, 8-14, 8-13, 8-12, 8-11, 8-10, 8-9, 10-50, 10-49, 10-48, 10-47, 10-46, 10-45, 10-44, 10-43, 10-42, 10-41, 10-40, 10-39, 10-38, 10-37, 10-36, 10-35, 10-34, 10-33, 10-32, 10-31, 10-30, 10-29, 10-28, 10-27, 10-26, 10-25, 10-24, 10-23, 10-22, 10-21, 10-20, 10-19, 10-18, 10-17, 10-16, 10-15, 10-14, 10-13, 10-12, 10-11, 10-10, 10-9, 12-50, 12-49, 12-48, 12-47, 12-46, 12-45, 12-44, 12-43, 12-42, 12-41, 12-40, 12-39, 12-38, 12-37, 12-36, 12-35, 12-34, 12-33, 12-32, 12-31, 12-30, 12-29, 12-28, 12-27, 12-26, 12-25, 12-24, 12-23, 12-22, 12-21, 12-20, 12-19, 12-18, 12-17, 12-16, 12-15, 12-14, 12-13, 15-50, 15-49, 15-48, 15-47, 15-46, 15-45, 15-44, 15-43, 15-42, 15-41, 15-40, 15-39, 15-38, 15-37, 15-36, 15-35, 15-34, 15-33, 15-32, 15-31, 15-30, 15-29, 15-28, 15-27, 15-26, 15-25, 15-24, 15-23, 15-22, 15-21, 15-20, 15-19, 15-18, 15-17, 18-50, 18-49, 18-48, 18-47, 18-46, 18-45, 18-44, 18-43, 18-42, 18-41, 18-40, 18-39, 18-38, 18-37, 18-36, 18-35, 18-34, 18-33, 18-32, 18-31, 18-30, 18-30, 18-29, 18-28, 18-27, 18-26, 18-25, 18-24, 18-23, 18-22, 18-21, 18-20, 19-50, 19-49, 19-48, 19-47, 19-46, 19-45, 19-44, 19-43, 19-42, 19-41, 19-40, 19-39, 19-38, 19-37, 19-36, 19-35, 19-34, 19-33, 19-32, 19-31, 19-30, 19-30, 19-29, 19-28, 19-27, 19-26, 19-25, 19-24, 19-23, 19-22, 19-21, 19-20, 20-50, 20-49, 20-48, 20-47, 20-46, 20-45, 20-44, 20-43, 20-42, 20-41, 20-40, 20-39, 20-38, 20-37, 20-36, 20-35, 20-34, 20-33, 20-32, 20-31, 20-30, 20-30, 20-29, 20-28, 20-27, 20-26, 20-25, 20-24, 20-23, 20-22, 20-21, 21-50, 21-49, 21-48, 21-47, 21-46, 21-45, 21-44, 21-43, 21-42, 21-41, 21-40, 21-39, 21-38, 21-37, 21-36, 21-35, 21-34, 21-33, 21-32, 21-31, 21-30, 21-29, 21-28, 21-27, 21-26, 21-25, 21-24, 21-23, 21-22, 22-50, 22-49, 22-48, 22-47, 22-46, 22-45, 22-44, 22-43, 22-42, 22-41, 22-40, 22-39, 22-38, 22-37, 22-36, 22-35, 22-34, 22-33, 22-32, 22-31, 22-30, 22-29, 22-28, 22-27, 22-26, 22-25, 22-24, 22-23, 23-50, 23-49, 23-48, 23-47, 23-46, 23-45, 23-44, 23-43, 23-42, 23-41, 23-40, 23-39, 23-38, 23-37, 23-36, 23-35, 23-34, 23-33, 23-32, 23-31, 23-30, 23-29, 23-28, 23-27, 23-26, 23-25, or 23-24 nucleotides in length. Ranges and lengths intermediate to the above recited ranges and lengths are also contemplated to be part of the disclosure.

### Chemical Modifications of ASOs

[0107] In certain embodiments, the ASO does not consist of only DNA. In certain embodiments, the ASO comprises at least one chemical modification relative to a natural nucleotide (e.g., ribonucleotide (e.g., 2′-deoxy-2′-ribonucleotide). Various chemical modifications can be included in the ASOs of the present disclosure. The modifications can include one or more modifications in a sugar group (e.g., ribose), one or more modifications in a phosphate group, one or more modifications in a nucleobase, one or more terminal modifications, or a combination thereof. In some embodiments, an exemplary ASO sequence targeting a regRNA as shown in FIG. 17, FIG. 18, or other sections of the instant disclosure, is chemically modified. Such modifications can be, but are not limited to, 2′-O-(2-methoxyethyl) (2′-MOE), locked nucleic acid (LNA), 5-methyl on the cytidine, constrained ethyl (cET), phosphorothioate (PS) linkage, and/or a phosphodiester (PO) linkage, or any combination thereof. Chemical modifications of RNA are known in the art and described in, for example, PCT Application Publication No. WO2013/177248, incorporated herein by reference. In certain embodiments, each cytidine in an ASO provided herein is modified by 5-methyl.

[0108] Various chemical modifications for use with ASOs of the present disclosure include, but are not limited to: 3′-terminal deoxy-thymine (dT) nucleotides, 2′-O-methyl modified nucleotides, 2′-fluoro modified nucleotides, 2′-deoxy-modified nucleotides, locked nucleotides, unlocked nucleotides, conformationally restricted nucleotides, constrained ethyl nucleotides, abasic nucleotides, 2′-amino-modified nucleotides, 2′-O-allyl-modified nucleotides, 2′-C-alkyl-modified nucleotides, 2′-hydroxyl-modified nucleotides, 2′-methoxyethyl modified nucleotides, 2′-O-alkyl-modified nucleotides, morpholino nucleotides, phosphoramidates, non-natural base comprising nucleotides, tetrahydropyran modified nucleotides, 1,5-anhydrohexitol modified nucleotides, cyclohexenyl modified nucleotides, nucleotides comprising a phosphorothioate group, nucleotides comprising a methylphosphonate group, nucleotides comprising a 5′-phosphate, and nucleotides comprising a 5′-phosphate mimic.

[0109] In certain embodiments, the ASO comprises an RNA polynucleotide chemically modified to be resistant to one or more nucleases (e.g., nuclear RNases (e.g., the exosome complex or RNaseH)). In some embodiments, all nucleotide bases are modified in the ASO. In certain embodiments, the chemical modifications comprises β-D-ribonucleotides, 2′-modified nucleotides (e.g., 2′-O-(2-methoxyethyl) (2′-MOE), 2′-O—CH₃, or 2′-fluoro-arabino (FANA)), bicyclic sugar modified nucleotides (e.g., having a constrained ethyl or locked nucleic acid (LNA)), and/or one or more modified internucleotide bonds (e.g., phosphorothioate internucleotide linkage). In certain embodiments, the chemical modification comprises 2′-MOE and a phosphorothioate internucleotide bond. In certain embodiments, at least 8, 9, 10, 11, 12, 13, 14, 15, 16, 17, 18, 19, 20, or more consecutive nucleotides of the ASO are modified by 2′-MOE. In certain embodiments, each nucleotide of the ASO is modified by 2′-MOE. In certain embodiments, at least 7, 8, 9, 10, 11, 12, 13, 14, 15, 16, 17, 18, 19, 20, or more consecutive internucleotide bonds of the ASO are phosphorothioate internucleotide bonds. In certain embodiments, each internucleotide bond of the ASO is a phosphorothioate internucleotide bond.

[0110] Internucleotide linkage modifications that can be used with the ASOs of the present disclosure include, but are not limited to, phosphorothioate “PS” (P(S)), phosphoramidate (P(NR₁R₂) such as dimethylaminophosphoramidate (P(N(CH₃)₂)), phosphonocarboxylate (P(CH₂)ₙCOOR) such as phosphonoacetate “PACE” (P(CH₂COO⁻)), thiophosphonocarboxylate ((S)P(CH₂)ₙCOOR) such as thiophosphonoacetate “thioPACE” ((S)P(CH₂COO⁻)), alkylphosphonate (P(C₁₋₃alkyl) such as methylphosphonate —P(CH₃), boranophosphonate (P(BH₃)), and phosphorodithioate (P(S)₂).

[0111] In some embodiments, an ASO provided herein comprises at least 1, 2, 3, 4, 5, 6, 7, 8, 9, 10, 11, 12, 13, 14, 15, 16, 17, 18, 19, 20, 21, 22, 23, 24, 25, 26, 27, 28, 29, 30, 31, 32, 33, 34, 35, 36, 37, 38, 39, 40, 41, 42, 43, 44, 45, 46, 47, 48, 49, 50, or more PO bonds. In some embodiments, all internucleotide bonds of an ASO provided herein are PO internucleotide bonds. In some embodiments, an ASO provided herein does not comprise PO internucleotide bonds. In some embodiments, an ASO provided herein comprises at least 1, 2, 3, 4, 5, 6, 7, 8, 9, 10, 11, 12, 13, 14, 15, 16, 17, 18, 19, 20, 21, 22, 23, 24, 25, 26, 27, 28, 29, 30, 31, 32, 33, 34, 35, 36, 37, 38, 39, 40, 41, 42, 43, 44, 45, 46, 47, 48, 49, 50, or more PS internucleotide bonds. In some embodiments, all internucleotide bonds of an ASO provided herein are PS bonds. In some embodiments, an ASO provided herein does not comprise PS internucleotide bonds.

[0112] In certain embodiments, the ASO comprises one or more chemical modifications at the 5′ end, the 3′ end, or both. Without wishing to be bound by theory, chemical modifications at one or both termini of a polynucleotide (e.g., polyribonucleotide) may stabilize the polynucleotide. In certain embodiments, the ASO comprises one or more chemical modifications in at least 1, 2, 3, 4, or 5 nucleotides at the 5′ end of the ASO. In certain embodiments, the ASO comprises one or more chemical modifications in at least 1, 2, 3, 4, or 5 nucleotides at the 3′ end of the ASO. In certain embodiments, the ASO comprises one or more chemical modifications in at least 1, 2, 3, 4, or 5 nucleotides at the 5′ end of the ASO and one or more chemical modifications in at least 1, 2, 3, 4, or 5 nucleotides at the 3′ end of the ASO.

[0113] The chemical structures can also be described in writing. In such cases, ‘M’ indicates MOE; ‘d’ indicates DNA, ‘L’ indicates LNA, “m” indicates 2′ OMethyl, ‘=’ indicates a phosphorothioate (PS) linkage, ‘-’ indicates a phosphodiester (PO) linkage; ‘5C’ indicates 5-MethylCytosine, ‘ag’ indicates GalNAc, ‘tg’ indicates Teg-GalNAc, ‘\hat{ }’ indicates FANA, “BioTeg” indicates Biotin; “Palm” indicates Palmitic acid; and “C18” indicates a Spacer 18 moiety.

[0114] To avoid ambiguity, this LNA has the formula:

[chemical structure]

wherein B is the particular designated base.

[0115] Visual representations of exemplary ASOs with chemical modifications are provided in FIGS. 17 and 18. Additional exemplary ASOs with chemical modifications are provided in Tables 17 and 18. In some embodiments, an ASO provided herein comprises a nucleotide sequence as provided in Table 17, below. In some embodiments, an ASO provided herein comprises a nucleotide sequence as provided in Table 18, below. In some embodiments, the ASO comprises a nucleotide sequence and/or chemical modification of any one of the oligonucleotides provided in Tables 17 and 18, below. In some embodiments, the ASO comprises a nucleotide sequence and/or chemical modification of any one of SEQ ID NOs: 1-442, 691, 991-1368, or 4743-4915. In some embodiments, the ASO comprises a nucleotide sequence and/or chemical modification of any one of SEQ ID NOs: 443-690, 692-990, or 4916.

TABLE 17
Exemplary ASOs targeting hGRN regRNA with chemical modifications

| SEQ | | Chemistry and Sequence |
|---|---|---|
| ID | | MOE (M); DNA (d); LNA (L); 2′ OMethyl (m); PS (=); PO(−); 5-MethylCytosine (5C); Biotin (BioTEG); Palmitic acid |
| NO | Name | (Palm); Spacer 18 (C18) |
| 10 | CO-3413 | M5C = MA = M5C = M5C = MT = MA = MG = MT = MG = MG = MA = MA = MG = MA = MT = MA = MA = M5C = MG = MG |
| 11 | CO-3414 | M5C = M5C = M5C = MT = MT = MG = MG = M5C = MA = M5C = MT = M5C = MG = MG = MA = MG = MT = MT = MG = MG |
| 12 | CO-3415 | MA = MG = M5C = MT = MA = MG = MG = MT = MT = MG = MG = M5C = MT = M5C = M5C = M5C = M5C = MT = MT = MT |
| 13 | CO-3416 | MT = M5C = M5C = M5C = MA = MG = M5C = M5C = MA = M5C = MT = MT = MT = MT = MT = M5C = M5C = MT = MG = M5C |
| 14 | CO-3417 | MT = M5C = M5C = MG = M5C = M5C = MT = M5C = MT = M5C = M5C = M5C = MA = MG = M5C = M5C = MA = M5C = MT = MT |
| 15 | CO-3418 | MT = MT = M5C = M5C = MG = M5C = M5C = MT = M5C = MT = M5C = M5C = M5C = MA = MG = M5C = M5C = MA = M5C = MT |
| 16 | CO-3419 | MG = MG = MT = MG = MG = MG = MA = M5C = MG = MA = MG = M5C = MT = MA = MG = M5C = MT = MT = M5C = M5C |
| 17 | CO-3420 | MT = MT = MA = M5C = MT = MT = M5C = M5C = MT = M5C = MT = MT = MG = MT = MT = MG = M5C = MG = MG = MG |
| 18 | CO-3421 | MT = M5C = MT = MG = MG = M5C = MT = M5C = M5C = MT = M5C = M5C = MT = MT = MA = M5C = MT = MT = M5C = M5C |
| 19 | CO-3422 | MG = MT = MG = MA = M5C = MT = MG = MA = MA = M5C = M5C = MT = MG = MG = MT = M5C = MT = MG = MG = M5C |
| 20 | CO-3423 | MG = MG = MA = M5C = MT = MT = MG = MG = MG = MA = MG = MT = MG = MG = MT = MG = MA = M5C = MT = MG |
| 21 | CO-3424 | MG = M5C = MT = MT = M5C = MT = M5C = MG = MA = MA = MG = MG = MT = MA = MG = MT = MA = MG = MG = MG |
| 22 | CO-3425 | MG = MA = MG = MA = M5C = M5C = MT = MG = MA = MG = MA = M5C = M5C = MT = MT = MG = MG = M5C = MT = MT |
| 23 | CO-3426 | MG = MG = M5C = M5C = MT = MG = MG = MG = MA = MA = M5C = MG = MA = MG = MA = M5C = M5C = MT = MG = MA |
| 24 | CO-3427 | M5C = MT = MG = MG = MT = MG = MG = MT = MG = MG = MT = MG = MG = MG = MT = MG = MG = MT = MT = M5C |
| 25 | CO-3428 | MA = M5C = M5C = M5C = M5C = MT = MG = MT = M5C = MG = MG = MT = MA = MG = MG = MT = MG = M5C = MT = MG |
| 26 | CO-3429 | MG = MG = MA = M5C = M5C = MA = M5C = MA = M5C = M5C = MA = MT = MT = M5C = MT = MT = MG = MA = M5C = M5C |
| 27 | CO-3430 | MG = MG = M5C = MT = MT = MT = M5C = MT = MA = M5C = M5C = MT = M5C = M5C = M5C = M5C = MA = MG = M5C = MA |
| 28 | CO-3431 | MA = MT = MT = MG = M5C = MA = MG = MT = MG = MA = M5C = MG = M5C = M5C = M5C = M5C = MG = MT = MT = MA |
| 29 | CO-3432 | MT = MT = MT = MT = MA = MT = MG = MG = MG = MA = MA = MA = MG = MA = MG = MG = MA = MA = MG = M5C |
| 30 | CO-3433 | M5C = MG = M5C = MT = MT = MA = M5C = MT = MG = MA = MA = MA = M5C = MT = M5C = M5C = MT = MT = MG = MG |
| 31 | CO-3434 | MA = MG = MA = MA = MG = MA = MA = M5C = M5C = MG = M5C = MT = MT = MA = M5C = MT = MG = MA = MA = MA |
| 32 | CO-3435 | M5C = MG = MG = MA = MG = MA = M5C = MA = MA = M5C = MA = MG = MA = MA = MG = MA = MA = M5C = M5C = MG |
| 33 | CO-3436 | MT = MT = M5C = M5C = M5C = M5C = MT = MG = MG = MA = MG = MT = M5C = MT = M5C = MA = MG = M5C = M5C = MG |
| 34 | CO-3437 | MG = MG = M5C = M5C = MA = MT = MG = MT = MG = MA = MG = M5C = MT = MT = MG = MA = MG = MG = MT = MT |
| 35 | CO-3438 | MA = MG = MA = M5C = M5C = MT = M5C = MT = M5C = MG = M5C = M5C = MT = MG = M5C = MT = M5C = M5C = MT = MG |
| 36 | CO-3439 | MA = MG = MT = M5C = MG = MG = MA = M5C = MG = M5C = MA = MG = MG = MT = MA = MG = MG = MA = MG = MA |
| 37 | CO-3440 | MT = MA = M5C = M5C = M5C = MG = MG = MT = MT = MG = M5C = MT = MG = M5C = MT = MG = M5C = M5C = M5C = MA |
| 38 | CO-3441 | MG = MG = MT = M5C = MT = MG = MT = MA = MG = MT = M5C = MT = MG = MA = MG = M5C = MG = M5C = MT = MA |
| 39 | CO-3442 | MA = MA = MT = MG = MG = MA = MA = MA = M5C = MT = MG = MA = MG = MG = MT = MA = MG = MG = M5C = MG |
| 40 | CO-3443 | MT = MA = MA = MG = MT = MA = MG = M5C = M5C = MA = MA = MT = MG = MG = MG = MA = MG = M5C = MG = MG |
| 41 | CO-3444 | MG = MG = M5C = M5C = M5C = M5C = MA = M5C = M5C = MT = M5C = MT = MA = MT = MA = MT = MT = MG = MA = MT |
| 42 | CO-3445 | MA = MG = MA = MA = MA = M5C = MA = M5C = MA = MG = M5C = MA = MT = MT = M5C = M5C = MA = MG = MG = M5C |
| 43 | CO-3446 | MA = MA = MG = MA = MA = MA = M5C = MA = M5C = MA = MG = M5C = MA = MT = MT = M5C = M5C = MA = MG = MG |
| 44 | CO-3447 | MG = MA = MA = MA = MA = MG = MA = MA = MA = M5C = MA = M5C = MA = MG = M5C = MA = MT = MT = M5C = M5C |
| 45 | CO-3448 | MT = MA = MG = MA = MA = MA = MA = MG = MA = MA = MA = M5C = MA = M5C = MA = MG = M5C = MA = MT = MT |
| 46 | CO-3449 | MG = MG = MG = MA = MG = MG = MA = MG = MA = MG = MT = MG = MA = MT = MT = MT = MG = MA = MG = MT |
| 47 | CO-3450 | MT = M5C = MA = M5C = MA = MT = MG = MA = MT = M5C = M5C = M5C = MT = MA = MG = MA = MA = MA = MT = MG |
| 48 | CO-3451 | MA = MT = M5C = MA = M5C = MA = MT = MG = MA = MT = M5C = M5C = M5C = MT = MA = MG = MA = MA = MA = MT |
| 49 | CO-3452 | M5C = M5C = MA = MA = MT = M5C = MA = M5C = MA = MT = MG = MA = MT = M5C = M5C = M5C = MT = MA = MG = MA |
| 50 | CO-3453 | M5C = MT = MG = MT = M5C = M5C = M5C = MG = MA = M5C = MG = MT = M5C = MA = M5C = MA = MT = MG = MA = MT |
| 51 | CO-3454 | MT = MG = MG = MG = MT = MT = MA = MA = MG = MG = MA = MA = MG = MG = M5C = MG = MA = M5C = MG = MA |
| 52 | CO-3455 | MG = M5C = M5C = MT = MG = M5C = MA = MG = MG = MA = MT = MG = MG = MG = MT = MT = MA = MA = MG = MG |
| 53 | CO-3456 | MT = MA = MT = M5C = MA = MT = M5C = MT = M5C = MT = MA = MG = M5C = MA = MA = MA = M5C = MT = M5C = M5C |
| 54 | CO-3457 | MA = M5C = MA = M5C = MG = M5C = MG = M5C = MT = MA = MT = M5C = MA = MT = M5C = MT = M5C = MT = MA = MG |
| 55 | CO-3458 | MG = M5C = MA = M5C = MT = MG = MT = M5C = MA = MA = MT = MG = M5C = M5C = M5C = M5C = MA = MG = MA = M5C |
| 56 | CO-3459 | MA = MA = MT = MT = M5C = MA = MT = MA = MA = M5C = MA = M5C = MT = M5C = M5C = M5C = MT = M5C = MG = M5C |
| 57 | CO-3460 | MG = MG = MA = MT = MA = MG = MA = MA = MA = MG = MG = M5C = MG = MA = MG = M5C = MA = M5C = MA = MA |
| 58 | CO-3461 | MA = MA = M5C = MA = MA = MA = M5C = MA = M5C = MA = M5C = MA = MA = MG = MT = M5C = M5C = MG = MG = MG |
| 59 | CO-3462 | MT = MA = MG = MG = MA = MG = MA = MA = MT = M5C = MG = M5C = MT = MT = MT = MG = MG = MG = MA = MG |
| 60 | CO-3463 | MG = MG = MA = MT = MA = MG = MG = MA = MT = MA = MG = MG = MA = MG = M5C = MG = MA = MG = M5C = M5C |
| 61 | CO-3464 | MT = MA = MG = M5C = MA = MT = MG = MT = M5C = MA = MA = M5C = M5C = MG = MA = MG = MT = MT = MT = MG |
| 62 | CO-3465 | MA = MT = M5C = M5C = MT = MT = M5C = MA = MA = M5C = MT = M5C = MA = M5C = MT = M5C = MT = MG = MG = MG |
| 63 | CO-3466 | MG = M5C = MT = MG = MT = MT = MT = MA = MT = M5C = MT = MT = MT = MG = MT = M5C = M5C = MT = MG = MG |
| 64 | CO-3467 | MG = MT = M5C = M5C = MT = MG = M5C = MT = MG = MA = MG = M5C = MA = M5C = M5C = MT = MT = MG = MA = MG |
| 65 | CO-3468 | MA = MG = MA = M5C = MT = MG = MT = M5C = MT = M5C = M5C = M5C = MA = M5C = M5C = MA = MA = MT = M5C = M5C |
| 66 | CO-3469 | M5C = MT = MT = MA = MA = MA = MT = MT = MA = MG = MA = MT = MT = M5C = MA = MG = M5C = M5C = MT = MG |
| 67 | CO-3470 | M5C = MT = MG = MG = M5C = MG = M5C = MA = M5C = MA = MA = M5C = M5C = MT = MT = MG = MT = MA = MT = M5C |
| 68 | CO-3471 | MT = M5C = MT = M5C = M5C = M5C = MT = MA = M5C = MA = M5C = M5C = MT = MG = MG = M5C = MA = MA = M5C = MT |
| 69 | CO-3472 | M5C = M5C = M5C = MA = M5C = M5C = MT = MG = MG = MA = MG = MA = M5C = MA = MA = MT = M5C = MT = MA = M5C |
| 70 | CO-3473 | MG = MA = MT = MG = M5C = MT = M5C = M5C = MT = MA = MA = MG = MG = MT = MG = MG = MA = MA = MT = MG |
| 71 | CO-3474 | M5C = M5C = MA = MG = MA = M5C = MT = M5C = MA = MG = M5C = MT = M5C = MA = MA = MG = MG = MA = MG = MA |
| 72 | CO-3475 | MA = M5C = M5C = MT = MG = M5C = M5C = MA = MG = MT = MT = MA = MA = MA = MA = MT = M5C = MT = MT = M5C |
| 73 | CO-3476 | MG = MG = M5C = MT = M5C = MT = MT = M5C = M5C = M5C = MA = MA = M5C = MA = M5C = M5C = MT = M5C = M5C = MT |
| 74 | CO-3477 | MT = MG = M5C = M5C = M5C = MT = MT = M5C = M5C = M5C = MA = MT = M5C = MT = MG = MG = MT = MT = MT = M5C |
| 75 | CO-3478 | MG = M5C = MA = MT = MT = M5C = MA = MA = MT = M5C = M5C = M5C = MT = MG = M5C = M5C = MA = MA = MG = M5C |
| 76 | CO-3479 | M5C = M5C = MA = M5C = MT = MG = MG = M5C = MA = MT = MT = MG = MA = MA = M5C = MA = MT = MG = MG = M5C |
| 77 | CO-3480 | MG = M5C = M5C = MA = M5C = MT = MT = M5C = MT = M5C = MT = MT = MT = M5C = MG = MA = M5C = MA = MG = M5C |
| 78 | CO-3481 | MG = M5C = M5C = MG = MA = MT = M5C = MT = MG = MG = MA = MG = MA = M5C = MT = MA = MG = MG = MA = MA |
| 79 | CO-3482 | M5C = M5C = MA = MT = MA = MT = M5C = MA = MA = MT = MT = M5C = M5C = MT = M5C = MG = MA = MA = MG = MG |
| 80 | CO-3483 | MG = M5C = MT = MA = MA = MT = M5C = MT = MG = MT = MT = M5C = MT = MG = MT = MG = MG = MT = MA = M5C |
| 81 | CO-3484 | M5C = MA = M5C = M5C = MA = MA = MG = M5C = MA = MG = MG = M5C = MT = MG = MA = M5C = MT = M5C = MT = MT |
| 82 | CO-3485 | M5C = MA = MT = M5C = MA = MT = M5C = M5C = MA = MT = M5C = MT = M5C = MT = MG = M5C = M5C = MT = MG = MG |
| 83 | CO-3486 | MT = M5C = MT = M5C = M5C = MT = M5C = MT = M5C = MT = M5C = M5C = MT = MG = MG = M5C = M5C = M5C = MA = MT |
| 84 | CO-3487 | MG = MA = M5C = MA = M5C = MT = MG = M5C = M5C = MG = MT = MT = M5C = M5C = MT = M5C = M5C = MA = M5C = MG |
| 85 | CO-3488 | MT = MG = M5C = MA = MG = M5C = MA = MG = MT = M5C = MT = M5C = M5C = MA = MT = M5C = M5C = M5C = M5C = MT |
| 86 | CO-3489 | MT = M5C = M5C = MA = MG = MT = MT = M5C = M5C = MT = MT = MG = M5C = MT = M5C = MA = MG = MG = M5C = MT |
| 87 | CO-3490 | MT = MG = MG = MT = MT = MA = MG = M5C = M5C = MA = MT = M5C = M5C = M5C = M5C = M5C = MT = MG = M5C = M5C |
| 88 | CO-3491 | M5C = M5C = MG = MA = M5C = MT = MT = M5C = MT = MG = M5C = MT = MG = M5C = M5C = MT = M5C = MG = MA = MG |
| 89 | CO-3492 | M5C = M5C = M5C = MT = MT = MT = M5C = M5C = M5C = MT = M5C = M5C = MT = M5C = M5C = MG = MA = M5C = MT = MT |
| 90 | CO-3493 | MA = MG = M5C = MT = M5C = MG = MG = MT = MT = MG = MG = M5C = MA = M5C = M5C = M5C = MT = MT = MT = M5C |
| 91 | CO-3494 | MG = M5C = M5C = MA = M5C = MA = M5C = MG = MA = M5C = MT = M5C = M5C = MA = M5C = MA = MG = M5C = MT = M5C |
| 92 | CO-3495 | MT = MT = MA = MG = MA = MA = M5C = M5C = M5C = M5C = MT = MG = M5C = M5C = MA = M5C = MA = M5C = MG = MA |
| 93 | CO-3496 | MG = MG = MT = M5C = MT = MG = M5C = MT = M5C = MT = MA = MG = M5C = MT = M5C = M5C = MA = MG = MG = M5C |
| 94 | CO-3497 | MG = MT = MG = MT = M5C = MT = MT = MA = MT = M5C = M5C = MG = M5C = MT = MG = MT = M5C = MT = MG = MG |
| 95 | CO-3498 | MA = M5C = MT = MA = MG = MT = MA = M5C = MT = MA = MG = MG = MT = M5C = M5C = MT = M5C = MA = MG = M5C |
| 96 | CO-3499 | MT = M5C = MT = M5C = MA = MA = MG = MA = MT = MA = M5C = MA = M5C = MA = MG = MG = MA = MA = MG = MG |
| 97 | CO-3500 | MA = MT = MA = MA = MA = M5C = MT = MA = MT = MA = M5C = MT = M5C = M5C = M5C = MT = MA = MG = MT = M5C |
| 98 | CO-3501 | MA = M5C = M5C = MT = MA = MA = M5C = MA = MT = MT = MT = M5C = MA = MT = MG = MA = MA = MA = MG = MT |
| 99 | CO-3502 | MG = MT = MA = MG = MG = MT = MT = MA = MT = MT = MG = MA = MT = M5C = MG = MA = MT = MT = M5C = MA |
| 100 | CO-3503 | MT = M5C = MT = MG = MG = MG = MT = MG = MG = MT = MT = MG = MT = MA = MA = MT = MT = MA = MG = MT |
| 101 | CO-3504 | M5C = MT = MA = M5C = M5C = MT = MG = MT = MA = MT = MT = MT = MT = MT = MT = MT = M5C = MT = MG = MG |
| 102 | CO-3505 | MG = MT = MG = MA = MT = MA = MT = MT = MT = MG = MT = MT = MT = M5C = MA = MG = MT = M5C = MT = MG |
| 103 | CO-3506 | M5C = MG = MG = M5C = MT = MT = MT = MG = MA = M5C = MG = MA = MT = MT = MA = MG = MA = M5C = MT = MT |
| 104 | CO-3507 | MG = M5C = MT = MG = M5C = MT = M5C = MA = MA = MG = MA = MA = MT = M5C = MA = M5C = MG = MG = M5C = MT |
| 105 | CO-3508 | MA = MT = MT = MG = M5C = M5C = MG = M5C = MT = MG = M5C = MT = M5C = MA = MA = MG = MA = MA = MT = M5C |
| 106 | CO-3509 | M5C = MT = M5C = M5C = MT = MA = MA = MA = MT = MG = MT = M5C = M5C = M5C = MT = MG = MG = M5C = M5C = MG |
| 107 | CO-3510 | MG = MT = MG = MT = M5C = M5C = M5C = MT = M5C = M5C = MA = M5C = M5C = M5C = MT = MG = MA = MG = MT = MT |
| 108 | CO-3511 | MG = MG = MA = MT = MT = MG = M5C = MT = MG = MG = M5C = M5C = M5C = MT = MT = MA = M5C = M5C = MT = MA |
| 109 | CO-3512 | MG = MT = M5C = MG = MT = MG = MT = MG = MA = MT = MG = MT = MT = MT = MA = MG = MT = MG = MG = MG |
| 110 | CO-3513 | MG = MA = MT = MT = MG = MT = MT = M5C = MT = MG = MT = MG = MT = MG = MT = M5C = MG = MT = MG = MT |
| 111 | CO-3514 | MG = MT = MG = MA = MA = MG = MT = MA = MG = MG = MT = MT = MG = MT = MT = MG = MA = MG = MT = M5C |
| 112 | CO-3515 | MA = M5C = M5C = MT = MT = MA = M5C = M5C = M5C = MT = MT = M5C = MT = MG = MA = MT = MG = MT = MT = MA |
| 113 | CO-3516 | MT = MT = MA = M5C = MA = MG = MA = M5C = M5C = MT = M5C = MG = MT = MT = MA = MT = M5C = MG = MT = MG |
| 114 | CO-3517 | MA = MA = MT = MT = MT = MT = MT = MT = MT = MG = MT = MG = MT = MT = MG = MG = M5C = MG = MG = MG |
| 115 | CO-3518 | MT = MG = M5C = MT = MG = M5C = MA = MT = MA = MA = M5C = MT = M5C = MT = M5C = MT = MT = MA = MA = MG |
| 116 | CO-3519 | MA = MT = MT = MG = MT = MA = MA = MT = MG = MA = MT = MG = M5C = MT = MG = M5C = MA = MT = MA = MA |
| 117 | CO-3520 | MT = MG = MG = MT = M5C = MT = MT = MA = MA = MA = M5C = MT = MG = MA = MT = MT = MG = MT = MA = MA |
| 118 | CO-3521 | M5C = MT = MA = MA = MA = MG = MG = MA = M5C = MA = MT = MA = MA = MG = MG = M5C = MT = MG = M5C = M5C |
| 119 | CO-3522 | MG = MG = MT = MT = MA = MG = MG = MG = MA = MG = MG = MG = MT = MG = MA = M5C = MT = MG = M5C = MT |
| 120 | CO-4106 | MG = MG = MA = M5C = MT = dT = dG = dG = dG = dA = dG = dT = dG = dG = dT = MG = MA = M5C = MT = MG |
| 121 | CO-4107 | MA = MT = MT = MG = M5C = dA = dG = dT = dG = dA = dC = dG = dC = dC = dC = M5C = MG = MT = MT = MA |
| 122 | CO-4108 | MG = MG = MA = MT = MA = dG = dG = dA = dT = dA = dG = dG = dA = dG = dC = MG = MA = MG = M5C = M5C |
| 123 | CO-4109 | MT = M5C = MT = MG = MG = dG = dT = dG = dG = dT = dT = dG = dT = dA = dA = MT = MT = MA = MG = MT |
| 124 | CO-4110 | MG = MG = MA = M5C = MT = dT = dG = dG = MG = dA = dG = MT = dG = dG = dT = MG = MA = M5C = MT = MG |
| 125 | CO-4111 | MG = MG = MA = MT = MA = dG = dG = dA = MT = dA = dG = MG = dA = dG = dC = MG = MA = MG = M5C = M5C |
| 126 | CO-4112 | MT = M5C = MT = MG = MG = dG = dT = dG = MG = dT = dT = MG = dT = dA = dA = MT = MT = MA = MG = MT |
| 127 | CO-4113 | MG = MG = MA = M5C = MT = LT = MG = MG = LG = MA = MG = LT = MG = MG = LT = MG = MA = M5C = MT = MG |
| 128 | CO-4114 | MG = MG = MA = MT = MA = LG = MG = MA = LT = MA = MG = LG = MA = MG = L5C = MG = MA = MG = M5C = M5C |
| 129 | CO-4115 | MT = M5C = MT = MG = MG = LG = MT = MG = LG = MT = MT = LG = MT = MA = LA = MT = MT = MA = MG = MT |
| 130 | CO-4116 | MG = MG = MG = MA = M5C = MT = MT = MG = MG = MG = MA = MG = MT = MG = MG = MT = MG = MA = M5C = MT = MG = MA |
| 131 | CO-4117 | MA = MG = MG = MG = MA = M5C = MT = MT = MG = MG = MG = MA = MG = MT = MG = MG = MT = MG = MA = M5C = MT = MG = MA = MA |
| 132 | CO-4118 | MA = MG = MG = MA = MT = MA = MG = MG = MA = MT = MA = MG = MG = MA = MG = M5C = MG = MA = MG = M5C = M5C = MA |
| 133 | CO-4119 | M5C = MA = MG = MG = MA = MT = MA = MG = MG = MA = MT = MA = MG = MG = MA = MG = M5C = MG = MA = MG = M5C = M5C = MA = MG |
| 134 | CO-4120 | MT = MT = M5C = MT = MG = MG = MG = MT = MG = MG = MT = MT = MG = MT = MA = MA = MT = MT = MA = MG = MT = MA |
| 135 | CO-4121 | MG = MT = MT = M5C = MT = MG = MG = MG = MT = MG = MG = MT = MT = MG = MT = MA = MA = MT = MT = MA = MG = MT = MA = MG |
| 136 | CO-4122 | M5C = MT = MT = MG = MG = MG = MA = MG = MT = MG = MG = MT = MG = MA = M5C = MT = MG = MA = MA = M5C |
| 137 | CO-4123 | MA = M5C = MT = MT = MG = MG = MG = MA = MG = MT = MG = MG = MT = MG = MA = M5C = MT = MG = MA = MA |
| 138 | CO-4124 | MG = MA = M5C = MT = MT = MG = MG = MG = MA = MG = MT = MG = MG = MT = MG = MA = M5C = MT = MG = MA |
| 139 | CO-4125 | MG = MG = MG = MA = M5C = MT = MT = MG = MG = MG = MA = MG = MT = MG = MG = MT = MG = MA = M5C = MT |
| 140 | CO-4126 | MT = MA = MG = MG = MG = MA = M5C = MT = MT = MG = MG = MG = MA = MG = MT = MG = MG = MT = MG = MA |
| 141 | CO-4127 | MA = MG = MT = MA = MG = MG = MG = MA = M5C = MT = MT = MG = MG = MG = MA = MG = MT = MG = MG = MT |
| 142 | CO-4128 | MG = MT = MA = MG = MT = MA = MG = MG = MG = MA = M5C = MT = MT = MG = MG = MG = MA = MG = MT = MG |
| 143 | CO-4129 | MA = MG = MG = MT = MA = MG = MT = MA = MG = MG = MG = MA = M5C = MT = MT = MG = MG = MG = MA = MG |
| 144 | CO-4130 | MT = MA = MG = MG = MA = MT = MA = MG = MG = MA = MG = M5C = MG = MA = MG = M5C = M5C = MA = MG = M5C |
| 145 | CO-4131 | MG = MA = MT = MA = MG = MG = MA = MT = MA = MG = MG = MA = MG = M5C = MG = MA = MG = M5C = M5C = MA |
| 146 | CO-4132 | MA = MG = MG = MA = MT = MA = MG = MG = MA = MT = MA = MG = MG = MA = MG = M5C = MG = MA = MG = M5C |
| 147 | CO-4133 | M5C = MA = MG = MG = MA = MT = MA = MG = MG = MA = MT = MA = MG = MG = MA = MG = M5C = MG = MA = MG |
| 148 | CO-4134 | MG = MG = MG = M5C = MA = MG = MG = MA = MT = MA = MG = MG = MA = MT = MA = MG = MG = MA = MG = M5C |
| 149 | CO-4135 | M5C = MA = MA = MG = MA = M5C = MA = MG = MG = MG = M5C = MA = MG = MG = MA = MT = MA = MG = MG = MA |
| 150 | CO-4136 | MA = MG = MG = MG = M5C = MA = MG = MA = MA = MT = MA = MG = MG = MG = M5C = MA = MG = MG = MA = M5C |
| 151 | CO-4137 | MA = MA = M5C = M5C = MG = MA = MG = MT = MT = MT = MG = MG = MA = MG = MA = MA = MT = MA = MG = MG |
| 152 | CO-4138 | MG = MG = MG = MT = MG = MG = MT = MT = MG = MT = MA = MA = MT = MT = MA = MG = MT = MA = MG = MG |
| 153 | CO-4139 | MT = MG = MG = MG = MT = MG = MG = MT = MT = MG = MT = MA = MA = MT = MT = MA = MG = MT = MA = MG |
| 154 | CO-4140 | MT = MT = M5C = MT = MG = MG = MG = MT = MG = MG = MT = MT = MG = MT = MA = MA = MT = MT = MA = MG |
| 155 | CO-4141 | MT = M5C = MT = MG = MG = MT = MT = M5C = MT = MG = MG = MG = MT = MG = MG = MT = MT = MG = MT = MA |
| 156 | CO-4353 | MG = MG = MA = M5C = MT = LT = dG = dG = LG = dA = dG = LT = dG = dG = LT = MG = MA = M5C = MT = MG |
| 157 | CO-4354 | MG = MG = MA = L5C = MT = LT = MG = LG = MG = LA = MG = LT = MG = LG = MT = LG = MA = L5C = MT = MG |
| 158 | CO-4355 | MG = MG = LA = M5C = LT = MT = LG = MG = LG = MA = LG = MT = LG = MG = LT = MG = LA = M5C = MT = MG |
| 159 | CO-4356 | MG = MG = LA = M5C = MT = LT = MG = MG = LG = MA = MG = LT = MG = MG = LT = MG = MA = L5C = MT = MG |
| 160 | CO-4357 | MG = MG = MA = M5C = LT = MT = MG = MG = LG = MA = MG = MT = LG = MG = MT = MG = LA = M5C = MT = MG |
| 161 | CO-4358 | MG = MG = MA = L5C = MT = MT = MG = LG = MG = MA = MG = LT = MG = MG = MT = LG = MA = M5C = MT = MG |
| 162 | CO-4359 | MG = MG = MA = M5C = MT = LT = MG = MG = MG = MA = LG = MT = MG = MG = MT = LG = MA = M5C = MT = MG |
| 163 | CO-4360 | MG = MG = MA = M5C = LT = MT = MG = MG = MG = LA = MG = MT = MG = MG = LT = MG = MA = M5C = MT = MG |
| 164 | CO-4361 | MG = MA = M5C = MT = MT = dG = dG = dG = dA = dG = dT = dG = dG = dT = dG = MA = M5C = MT = MG = MA |
| 165 | CO-4362 | MG = MA = M5C = MT = MT = dG = dG = dG = MA = dG = dT = MG = dG = dT = dG = MA = M5C = MT = MG = MA |
| 166 | CO-4363 | MG = MG = MA = M5C = MT = MT = MG = MG = MG = MA = MG = MT = MG = MG = MT = MG = MA = M5C = MT = MG = MA |
| 167 | CO-4364 | MG = MG = MA = M5C = MT = MT = MG = MG = MG = MA = MG = MT = MG = MG = MT = MG = MA = M5C = MT = MG = MA = MA = M5C |
| 168 | CO-4452 | MG = MG = MA − M5C − MT = MT = MG = MG = MG = MA = MG = MT = MG = MG − MT = MG − MA − M5C = MT = MG |
| 169 | CO-4453 | MG = MG = MA − M5C − MT = MT = MG = MG = MG = MA = MG = MT = MG = MG = MT = MG − MA − M5C = MT = MG |
| 170 | CO-4454 | MG = MG = MA − M5C − MT − MT − MG − MG − MG − MA − MG − MT − MG − MG − MT − MG − MA − M5C = MT = MG |
| 171 | CO-4455 | MA = MT = MT − MG − M5C = MA = MG = MT = MG = MA = M5C = MG = M5C = M5C = M5C = M5C − MG − MT = MT = MA |
| 172 | CO-4456 | MA = MT = MT − MG − M5C − MA − MG = MT = MG = MA = M5C = MG = M5C = M5C − M5C − M5C − MG − MT = MT = MA |
| 173 | CO-4457 | MA = MT = MT − MG − M5C − MA − MG − MT − MG − MA − M5C − MG − M5C − M5C − M5C − M5C − MG − MT = MT = MA |
| 269 | CO-4585 | MT = M5C = MG = MA = MA = MT = M5C = MT = M5C = M5C = MG = MG = M5C = MT = M5C = MT = MT = M5C = MA = M5C |
| 270 | CO-4586 | MT = MG = MA = M5C = MA = MA = MG = M5C = MG = MG = MG = MA = MT = M5C = MG = MG = MA = MG = MA = MG |
| 271 | CO-4587 | MT = MT = M5C = MT = MA = MA = MA = M5C = MG = M5C = MG = MA = MA = MG = MT = MG = MG = MG = MT = MG |
| 272 | CO-4588 | MG = M5C = MT = MG = MG = MT = MT = MT = M5C = MT = M5C = MT = MG = MT = MT = MA = MG = MG = MA = M5C |
| 273 | CO-4589 | M5C = MG = M5C = MA = MG = MG = M5C = MT = MA = MG = MG = MA = MG = MT = MA = M5C = M5C = M5C = MA = MT |
| 274 | CO-4590 | MG = MT = M5C = MA = MA = MA = MG = MT = M5C = MG = MA = MG = MG = M5C = M5C = MT = MA = M5C = M5C = M5C |
| 275 | CO-4591 | MG = MA = MT = MA = MG = MT = MT = MG = MG = M5C = M5C = M5C = M5C = MT = M5C = MG = MG = MA = MG = MT |
| 276 | CO-4592 | MG = MG = MT = M5C = MA = M5C = MA = MG = MA = MT = MT = MG = M5C = MA = M5C = MT = M5C = MT = M5C = M5C |
| 277 | CO-4593 | MT = MT = MT = MT = MG = M5C = M5C = M5C = MA = MG = M5C = MG = M5C = M5C = M5C = M5C = MT = MT = MT = MA |
| 278 | CO-4594 | MA = MA = MA = MG = MG = MA = M5C = MG = M5C = M5C = MT = MT = M5C = MT = M5C = MT = M5C = MG = MG = MG |
| 279 | CO-4595 | MA = MG = M5C = M5C = M5C = MG = MA = M5C = M5C = MT = MT = MG = MA = M5C = MT = MG = MA = MT = MA = MG |
| 280 | CO-4596 | M5C = MA = MA = M5C = MT = MA = MT = M5C = MA = MG = MT = M5C = MA = MA = MG = MG = MT = M5C = MG = MG |
| 281 | CO-4597 | MA = MG = MG = M5C = MG = MT = M5C = M5C = MT = MT = MT = M5C = M5C = MA = MT = MT = M5C = M5C = M5C = MT |
| 282 | CO-4598 | MG = MT = MG = M5C = MA = MA = MT = M5C = MT = MG = MT = MG = MA = M5C = M5C = MT = MG = MT = MA = MA |
| 283 | CO-4599 | MG = MG = M5C = M5C = MA = MA = M5C = MT = MA = MT = M5C = MA = MG = M5C = MT = MT = MT = M5C = M5C = M5C |
| 284 | CO-4600 | MT = MT = MA = MG = M5C = MA = M5C = MG = MT = MG = MG = MA = M5C = MT = M5C = M5C = MG = MA = MG = MG |
| 285 | CO-4601 | MG = MT = MA = MG = MG = M5C = M5C = MT = M5C = MG = MA = M5C = MT = MT = MT = MG = MA = M5C = MG = MT |
| 286 | CO-4602 | MT = MA = M5C = MT = M5C = M5C = MT = MA = MG = M5C = M5C = MT = MG = M5C = MG = M5C = M5C = MT = MT = MT |
| 287 | CO-4603 | M5C = M5C = MA = M5C = MT = MT = M5C = MG = M5C = MG = MT = MT = MT = MA = MG = MA = MA = M5C = MT = MT |
| 288 | CO-4604 | MT = M5C = MT = M5C = M5C = MG = MA = MT = M5C = M5C = M5C = MG = M5C = MT = MT = MG = MT = M5C = MA = MG |
| 289 | CO-4605 | M5C = MG = MG = MG = MA = MG = MA = M5C = MA = MG = MG = MA = MA = MG = MG = M5C = MT = MT = MA = MA |
| 290 | CO-4606 | MA = M5C = MG = MT = MG = MA = MA = MG = MA = MG = M5C = M5C = MG = MG = MA = MG = MA = MT = MT = M5C |
| 291 | CO-4607 | MA = MA = MG = MA = MA = MA = MT = MA = MG = MA = MT = MT = MA = M5C = M5C = M5C = M5C = MG = MT = MT |
| 292 | CO-4608 | MT = MA = MG = MA = M5C = MA = M5C = MT = MT = M5C = M5C = MA = MG = M5C = M5C = M5C = MA = M5C = M5C = MT |
| 293 | CO-4609 | M5C = M5C = MA = MA = MT = MA = MA = MA = MG = M5C = M5C = MT = MT = MG = MG = MG = MT = MG = M5C = M5C |
| 294 | CO-4610 | MG = MG = MA = M5C = MA = MT = MG = M5C = MT = MG = MG = MA = MA = MA = MG = MT = M5C = MT = MT = MA |
| 295 | CO-4611 | MT = MA = MT = MT = MA = MA = MT = M5C = M5C = MA = M5C = MG = M5C = MT = MG = MT = M5C = M5C = M5C = MA |
| 296 | CO-4612 | MA = MT = MG = MG = M5C = MT = MA = MA = MA = MA = M5C = MT = MA = M5C = M5C = MT = MT = M5C = M5C = MA |
| 297 | CO-4613 | MA = MT = M5C = MA = MA = MG = MG = MG = MT = MT = MT = MG = MG = M5C = MG = MT = MT = MT = MA = MG |
| 298 | CO-4614 | MT = MG = MA = M5C = MT = MA = MG = MA = MG = MA = MA = MA = M5C = MG = M5C = MT = MT = MA = MG = MA |
| 299 | CO-4615 | M5C = MA = MT = MT = MT = M5C = MA = M5C = MA = M5C = MT = MT = MG = MT = MA = MT = MG = MA = MG = M5C |
| 300 | CO-4616 | MA = MA = MG = MA = MA = MG = MG = M5C = M5C = MA = MA = MG = M5C = MT = MG = MG = MT = MA = M5C = M5C |
| 301 | CO-4617 | MG = MG = MA = MG = MA = MT = MA = MG = MG = MG = MT = M5C = MA = M5C = MG = MT = MA = M5C = MT = MT |
| 302 | CO-4618 | MA = MT = MA = MG = MG = MT = M5C = MA = MG = MG = MG = MA = MA = MT = MG = M5C = M5C = MG = M5C = M5C |
| 303 | CO-4619 | MT = MG = MA = MT = MA = MT = MA = MG = MA = MG = MA = MT = M5C = MT = MG = M5C = MA = MG = M5C = M5C |
| 304 | CO-4620 | MG = MT = M5C = M5C = MA = MG = M5C = MA = M5C = MG = M5C = MT = M5C = MT = M5C = MA = MG = M5C = MA = M5C |
| 305 | CO-4621 | M5C = MG = M5C = MT = MG = M5C = MT = MG = MT = MT = MT = MG = MG = MA = MA = M5C = MG = MA = MG = MT |
| 306 | CO-4622 | MA = M5C = MA = MG = MT = MG = MG = M5C = M5C = MG = M5C = MA = MT = MA = MA = MA = MT = MT = MT = M5C |
| 307 | CO-4623 | M5C = M5C = MT = MG = MA = M5C = M5C = MT = MG = M5C = M5C = MA = MT = M5C = MT = MA = MT = M5C = MA = MA |
| 308 | CO-4624 | MG = MT = M5C = MA = MG = MA = M5C = MT = MG = MT = M5C = M5C = MT = MA = M5C = MA = M5C = M5C = MT = MT |
| 309 | CO-4625 | MT = M5C = MT = MT = MG = MT = MT = MG = MT = MT = MG = MG = MA = MA = MA = MT = MT = M5C = M5C = M5C |
| 310 | CO-4626 | M5C = M5C = MT = M5C = MA = MT = MG = MT = MA = MT = MG = MT = MA = MA = MT = MT = MG = M5C = M5C = M5C |
| 311 | CO-4627 | MA = M5C = MT = M5C = MA = MA = MT = MG = M5C = MA = MT = MA = MG = M5C = MA = MG = MA = MA = MT = MA |
| 312 | CO-4628 | MT = M5C = M5C = MA = MT = MA = M5C = MA = MA = M5C = MT = MG = M5C = MA = MG = MA = MG = MT = MG = MG |
| 313 | CO-4629 | MA = MT = MG = MG = M5C = MA = MA = MA = MT = MG = MA = M5C = M5C = MT = MT = M5C = MG = MG = MT = MA |
| 314 | CO-4630 | MG = MT = M5C = MT = MT = M5C = MA = MA = MG = MA = MA = M5C = MT = MT = MT = MA = M5C = M5C = MG = MA |
| 315 | CO-4631 | MA = M5C = M5C = MA = M5C = MT = M5C = MT = MG = M5C = MA = MG = MT = MT = MG = MT = MA = MT = MG = MG |
| 316 | CO-4632 | MT = MG = M5C = MT = MA = MT = MG = M5C = MA = MT = MT = MG = MA = MG = MT = MT = MT = MT = M5C = M5C |
| 317 | CO-4633 | MT = M5C = M5C = MT = M5C = MT = MG = M5C = M5C = MT = MG = MA = M5C = MT = MA = MA = MT = MT = M5C = MG |
| 318 | CO-4634 | MT = MT = MT = MA = M5C = M5C = M5C = MA = MT = MA = MT = MA = M5C = M5C = M5C = MA = M5C = MA = M5C = M5C |
| 319 | CO-4635 | MG = MT = MT = MT = MG = M5C = MA = MA = MT = MT = M5C = MT = M5C = MA = MG = MA = M5C = M5C = MT = MG |
| 320 | CO-4636 | MG = MG = M5C = MA = MA = MT = MT = MA = M5C = MA = MT = MA = M5C = MA = MT = MG = MA = MG = MG = MA |
| 321 | CO-4637 | MT = MA = MA = MG = MG = MT = MG = MT = MA = MG = MG = MA = M5C = MA = MG = MT = M5C = MT = MG = MA |
| 322 | CO-4638 | MT = MT = MG = MA = MT = MA = MG = MA = MT = MG = MG = M5C = MA = MG = MG = MT = M5C = MA = MG = MG |
| 323 | CO-4639 | MG = MA = MA = MA = MT = MT = MT = MA = MT = MG = M5C = MG = MG = M5C = M5C = MA = M5C = MT = MG = MT |
| 324 | CO-4640 | MG = M5C = M5C = M5C = M5C = M5C = MT = MA = MG = MA = MG = MG = MA = M5C = MA = MT = MT = MT = MT = MT |
| 325 | CO-4641 | M5C = MG = MT = MT = M5C = M5C = MA = MA = MA = M5C = MA = MG = M5C = MA = MG = M5C = MG = MT = MT = MA |
| 326 | CO-4642 | MG = MG = M5C = MT = MG = M5C = MA = MG = MA = MT = M5C = MT = M5C = MT = MA = MT = MA = MT = M5C = MA |
| 327 | CO-4643 | M5C = MG = MG = M5C = MA = MT = MT = M5C = M5C = M5C = MT = MG = MA = M5C = M5C = MT = MA = MT = M5C = M5C |
| 328 | CO-4644 | MG = MT = MT = MA = MA = MG = MT = MA = M5C = MG = MT = MG = MA = M5C = M5C = M5C = MT = MA = MT = M5C |
| 329 | CO-4645 | MA = M5C = MA = MG = M5C = MA = MG = MA = MA = M5C = MA = MT = M5C = M5C = M5C = MG = MT = MG = MA = MA |
| 330 | CO-4646 | MG = MT = MG = MT = MG = MA = MA = MA = MT = MG = MA = MT = MG = MG = MT = MA = M5C = M5C = MA = MG |
| 331 | CO-4647 | M5C = MT = MA = MA = MG = M5C = MG = MT = MT = MT = M5C = MT = M5C = MT = MA = MG = MT = M5C = MA = MT |
| 332 | CO-4648 | MA = M5C = MG = M5C = M5C = MA = MA = MA = M5C = M5C = M5C = MT = MT = MG = MA = MT = M5C = M5C = MA = MG |
| 333 | CO-4649 | MT = MG = MG = MG = MA = M5C = MA = MG = M5C = MG = MT = MG = MG = MA = MT = MT = MA = MA = MT = MA |
| 334 | CO-4650 | MT = MA = MA = MG = MA = M5C = MT = MT = MT = M5C = M5C = MA = MG = M5C = MA = MT = MG = MT = M5C = M5C |
| 335 | CO-4651 | MT = MA = MG = MG = M5C = MA = M5C = M5C = M5C = MA = MA = MG = MG = M5C = MT = MT = MT = MA = MT = MT |
| 174 | CO-5264 | MG = MG = MA − M5C − MT − MT − MG − MG − MG − MA − MG − MT − MG − MG − MT − MG − MA = M5C = MT = MG |
| 175 | CO-5265 | MG = MG = MA = M5C = MT − MT − MG − MG − MG − MA − MG − MT − MG − MG − MT − MG − MA = M5C = MT = MG |
| 176 | CO-5266 | MG = MG = MA = M5C = MT = MT = MG − MG − MG − MA − MG − MT − MG − MG − MT − MG − MA = M5C = MT = MG |
| 177 | CO-5267 | MG = MG = MA = M5C = MT = MT = MG = MG = MG − MA − MG − MT − MG − MG − MT − MG − MA = M5C = MT = MG |
| 178 | CO-5268 | MG = MG = MA = M5C = MT = MT = MG = MG = MG = MA = MG − MT − MG − MG − MT − MG − MA = M5C = MT = MG |
| 179 | CO-5269 | MG = MG = MA = M5C = MT = MT = MG = MG = MG = MA = MG = MT = MG − MG − MT − MG − MA = M5C = MT = MG |
| 180 | CO-5270 | MG = MG = MA − M5C − MT − MT − MG − MG − MG − MA − MG − MT − MG − MG − MT − MG = MA = M5C = MT = MG |
| 181 | CO-5271 | MG = MG = MA − M5C − MT − MT − MG − MG − MG − MA − MG − MT − MG − MG = MT = MG = MA = M5C = MT = MG |
| 182 | CO-5272 | MG = MG = MA − M5C − MT − MT − MG − MG − MG − MA − MG − MT = MG = MG = MT = MG = MA = M5C = MT = MG |
| 183 | CO-5273 | MG = MG = MA − M5C − MT − MT − MG − MG − MG − MA = MG = MT = MG = MG = MT = MG = MA = M5C = MT = MG |
| 184 | CO-5274 | MG = MG = MA − M5C − MT − MT − MG − MG = MG = MA = MG = MT = MG = MG = MT = MG = MA = M5C = MT = MG |
| 185 | CO-5275 | LG = LG = MA = L5C = LT = MT = LG = MG = LG = MA = LG = MT = LG = MG = LT = MG = LA = M5C = LT = LG |
| 186 | CO-5276 | LG = LG = MA = L5C = MT = LT = MG = LG = MG = LA = MG = LT = MG = LG = MT = LG = LA = M5C = LT = LG |
| 187 | CO-5277 | MG = MG = MA − MT − MA − MG − MG − MA − MT − MA − MG − MG − MA − MG − M5C − MG − MA = MG = M5C = M5C |
| 188 | CO-5278 | MG = MG = MA = MT = MA − MG − MG − MA − MT − MA − MG − MG − MA − MG − M5C − MG − MA = MG = M5C = M5C |
| 189 | CO-5279 | MG = MG = MA = MT = MA = MG = MG − MA − MT − MA − MG − MG − MA − MG − M5C − MG − MA = MG = M5C = M5C |
| 190 | CO-5280 | MG = MG = MA = MT = MA = MG = MG = MA = MT − MA − MG − MG − MA − MG − M5C − MG − MA = MG = M5C = M5C |
| 191 | CO-5281 | MG = MG = MA = MT = MA = MG = MG = MA = MT = MA = MG − MG − MA − MG − M5C − MG − MA = MG = M5C = M5C |
| 192 | CO-5282 | MG = MG = MA = MT = MA = MG = MG = MA = MT = MA = MG = MG = MA − MG − M5C − MG − MA = MG = M5C = M5C |
| 193 | CO-5283 | MG = MG = MA − MT − MA − MG − MG − MA − MT − MA − MG − MG − MA − MG − M5C − MG = MA = MG = M5C = M5C |
| 194 | CO-5284 | MG = MG = MA − MT − MA − MG − MG − MA − MT − MA − MG − MG − MA − MG = M5C = MG = MA = MG = M5C = M5C |
| 195 | CO-5285 | MG = MG = MA − MT − MA − MG − MG − MA − MT − MA − MG − MG = MA = MG = M5C = MG = MA = MG = M5C = M5C |
| 196 | CO-5286 | MG = MG = MA − MT − MA − MG − MG − MA − MT − MA = MG = MG = MA = MG = M5C = MG = MA = MG = M5C = M5C |
| 197 | CO-5287 | MG = MG = MA − MT − MA − MG − MG − MA = MT = MA = MG = MG = MA = MG = M5C = MG = MA = MG = M5C = M5C |
| 198 | CO-5288 | LG = LG = MA = LT = LA = MG = LG = MA = LT = MA = LG = MG = LA = MG = L5C = MG = LA = MG = L5C = L5C |
| 199 | CO-5289 | LG = LG = MA = LT = MA = LG = MG = LA = MT = LA = MG = LG = MA = LG = M5C = LG = LA = MG = L5C = L5C |
| 336 | CO-6267 | MA = MA = MG = MA = MG = M5C = M5C = MG = MG = MA = MG = MA = MT = MT = M5C = MG = MA = MA = M5C = M5C |
| 337 | CO-6268 | MG = MA = MA = MG = MA = MG = M5C = M5C = MG = MG = MA = MG = MA = MT = MT = M5C = MG = MA = MA = M5C |
| 338 | CO-6269 | MG = MT = MG = MA = MA = MG = MA = MG = M5C = M5C = MG = MG = MA = MG = MA = MT = MT = M5C = MG = MA |
| 339 | CO-6270 | MA = M5C = MG = MT = MG = dA = dA = dG = dA = dG = d5C = d5C = dG = dG = dA = MG = MA = MT = MT = M5C |
| 340 | CO-6271 | M5C = MG = MA = M5C = MG = MT = MG = MA = MA = MG = MA = MG = M5C = M5C = MG = MG = MA = MG = MA = MT |
| 341 | CO-6272 | MT = M5C = MG = MA = M5C = MG = MT = MG = MA = MA = MG = MA = MG = M5C = M5C = MG = MG = MA = MG = MA |
| 342 | CO-6273 | M5C = M5C = M5C = MG = MT = MT = MT = MT = MA = M5C = MA = MG = MA = MA = MA = MG = MT = MG = MA = MA |
| 343 | CO-6274 | MA = M5C = M5C = M5C = M5C = MG = MT = MT = MT = MT = MA = M5C = MA = MG = MA = MA = MA = MG = MT = MG |
| 344 | CO-6275 | MT = MT = MA = M5C = M5C = M5C = M5C = MG = MT = MT = MT = MT = MA = M5C = MA = MG = MA = MA = MA = MG |
| 345 | CO-6276 | MG = MA = MT = MT = MA = M5C = M5C = M5C = M5C = MG = MT = MT = MT = MT = MA = M5C = MA = MG = MA = MA |
| 346 | CO-6277 | MT = MA = MG = MA = MT = MT = MA = M5C = M5C = M5C = M5C = MG = MT = MT = MT = MT = MA = M5C = MA = MG |
| 347 | CO-6278 | MA = MA = MT = MA = MG = MA = MT = MT = MA = M5C = M5C = M5C = M5C = MG = MT = MT = MT = MT = MA = M5C |
| 348 | CO-6279 | MA = M5C = MG = MT = MG = dA = dA = dG = MA = dG = d5C = M5C = dG = dG = dA = MG = MA = MT = MT = M5C |
| 349 | CO-6280 | MA = M5C = MG = MT = MG = LA = dA = dG = LA = dG = d5C = L5C = dG = dG = LA = MG = MA = MT = MT = M5C |
| 350 | CO-6281 | MA = M5C = MG = LT = MG = dA = dA = LG = dA = dG = d5C = L5C = dG = dG = dA = LG = MA = MT = MT = M5C |
| 351 | CO-6282 | MA = M5C = MG = MT = LG = dA = dA = dG = LA = dG = d5C = d5C = LG = dG = dA = MG = LA = MT = MT = M5C |
| 352 | CO-6283 | MA = M5C = MG = MT = MG = LA = MA = MG = LA = MG = M5C = L5C = MG = MG = LA = MG = MA = MT = MT = M5C |
| 353 | CO-6284 | MA = M5C = MG = LT = MG = LA = MA = LG = MA = LG = M5C = L5C = MG = LG = MA = LG = MA = LT = MT = M5C |
| 354 | CO-6285 | MA = M5C = LG = MT = LG = MA = LA = MG = LA = MG = L5C = M5C = LG = MG = LA = MG = LA = MT = MT = M5C |
| 355 | CO-6286 | MA = M5C = LG = MT = MG = LA = MA = MG = LA = MG = M5C = L5C = MG = MG = LA = MG = MA = LT = MT = M5C |
| 356 | CO-6287 | MA = M5C = MG = MT = LG = MA = MA = MG = LA = MG = M5C = M5C = LG = MG = MA = MG = LA = MT = MT = M5C |
| 357 | CO-6288 | MA = M5C = MG = LT = MG = MA = MA = LG = MA = MG = M5C = L5C = MG = MG = MA = LG = MA = MT = MT = M5C |
| 358 | CO-6289 | MA = M5C = MG = MT = MG = LA = MA = MG = MA = MG = L5C = M5C = MG = MG = MA = LG = MA = MT = MT = M5C |
| 359 | CO-6290 | MA = M5C = MG = MT = LG = MA = MA = MG = MA = LG = M5C = M5C = MG = MG = LA = MG = MA = MT = MT = M5C |
| 360 | CO-6291 | M5C = MT = MG = MG = MA = MT = MA = MG = MG = MT = M5C = MA = MG = MG = MG = MA = MA = MT = MG = M5C |
| 361 | CO-6292 | MA = MG = MA = MG = MA = MT = M5C = MT = MG = M5C = MA = MG = M5C = M5C = M5C = MT = M5C = MA = M5C = M5C |
| 362 | CO-6293 | MA = MT = MA = MG = MA = MG = MA = MT = M5C = MT = MG = M5C = MA = MG = M5C = M5C = M5C = MT = M5C = MA |
| 363 | CO-6294 | MA = MT = MA = MT = MA = MG = MA = MG = MA = MT = M5C = MT = MG = M5C = MA = MG = M5C = M5C = M5C = MT |
| 364 | CO-6295 | MT = MG = MA = MT = MA = dT = dA = dG = dA = dG = dA = dT = d5C = dT = dG = M5C = MA = MG = M5C = M5C |
| 365 | CO-6296 | MA = MA = MT = MG = MA = MT = MA = MT = MA = MG = MA = MG = MA = MT = M5C = MT = MG = M5C = MA = MG |
| 366 | CO-6297 | MA = MT = MA = MA = MT = MG = MA = MT = MA = MT = MA = MG = MA = MG = MA = MT = M5C = MT = MG = M5C |
| 367 | CO-6298 | MA = MA = M5C = MT = M5C = MT = MG = MT = M5C = MT = MT = MT = MG = MA = MG = MA = MT = MT = MG = MT |
| 368 | CO-6299 | MG = M5C = MA = M5C = M5C = MT = MG = M5C = MT = MG = MT = MT = MT = MA = MA = MT = MT = MT = MA = MA |
| 369 | CO-6300 | MT = MG = MA = MT = MA = dT = dA = dG = MA = dG = dA = MT = d5C = dT = dG = M5C = MA = MG = M5C = M5C |
| 370 | CO-6301 | MT = MG = MA = MT = MA = LT = dA = dG = LA = dG = dA = LT = d5C = dT = LG = M5C = MA = MG = M5C = M5C |
| 371 | CO-6302 | MT = MG = MA = LT = MA = dT = dA = LG = dA = dG = dA = LT = d5C = dT = dG = L5C = MA = MG = M5C = M5C |
| 372 | CO-6303 | MT = MG = MA = MT = LA = dT = dA = dG = LA = dG = dA = dT = L5C = dT = dG = M5C = LA = MG = M5C = M5C |
| 373 | CO-6304 | MT = MG = MA = MT = MA = LT = MA = MG = LA = MG = MA = LT = M5C = MT = LG = M5C = MA = MG = M5C = M5C |
| 374 | CO-6305 | MT = MG = MA = LT = MA = LT = MA = LG = MA = LG = MA = LT = M5C = LT = MG = L5C = MA = LG = M5C = M5C |
| 375 | CO-6306 | MT = MG = LA = MT = LA = MT = LA = MG = LA = MG = LA = MT = L5C = MT = LG = M5C = LA = MG = M5C = M5C |
| 376 | CO-6307 | MT = MG = LA = MT = MA = LT = MA = MG = LA = MG = MA = LT = M5C = MT = LG = M5C = MA = LG = M5C = M5C |
| 377 | CO-6308 | MT = MG = MA = MT = LA = MT = MA = MG = LA = MG = MA = MT = L5C = MT = MG = M5C = LA = MG = M5C = M5C |
| 378 | CO-6309 | MT = MG = MA = LT = MA = MT = MA = LG = MA = MG = MA = LT = M5C = MT = MG = L5C = MA = MG = M5C = M5C |
| 379 | CO-6310 | MT = MG = MA = MT = MA = LT = MA = MG = MA = MG = LA = MT = M5C = MT = MG = L5C = MA = MG = M5C = M5C |
| 380 | CO-6311 | MT = MG = MA = MT = LA = MT = MA = MG = MA = LG = MA = MT = M5C = MT = LG = M5C = MA = MG = M5C = M5C |
| 381 | CO-6312 | MT = M5C = MT = MA = MA = MA = M5C = MG = M5C = M5C = MA = MA = MA = M5C = M5C = M5C = MT = MT = MG = MA |
| 382 | CO-6313 | MA = MT = MT = M5C = MT = MA = MA = MA = M5C = MG = M5C = M5C = MA = MA = MA = M5C = M5C = M5C = MT = MT |
| 383 | CO-6314 | MA = MA = MA = MT = MT = M5C = MT = MA = MA = MA = M5C = MG = M5C = M5C = MA = MA = MA = M5C = M5C = M5C |
| 384 | CO-6315 | MG = M5C = M5C = MA = MT = MA = MG = M5C = MT = MA = MT = MG = MA = MA = MA = MA = MT = MT = M5C = MT |
| 385 | CO-6316 | MG = MA = MA = MG = MG = MT = MA = MG = MT = MT = MT = MT = MA = MG = M5C = M5C = MA = MT = MA = MG |
| 386 | CO-6317 | MT = MG = MG = MA = MA = MG = MG = MT = MA = MG = MT = MT = MT = MT = MA = MG = M5C = M5C = MA = MT |
| 387 | CO-6318 | MT = MA = MT = MG = MG = MA = MA = MG = MG = MT = MA = MG = MT = MT = MT = MT = MA = MG = M5C = M5C |
| 388 | CO-6319 | MT = MG = MG = MA = MT = MT = MA = MA = MT = MA = MT = MG = MG = MA = MA = MG = MG = MT = MA = MG |
| 389 | CO-6320 | M5C = MG = MT = MG = MG = MA = MT = MT = MA = MA = MT = MA = MT = MG = MG = MA = MA = MG = MG = MT |
| 390 | CO-6321 | MA = MG = M5C = MG = MT = MG = MG = MA = MT = MT = MA = MA = MT = MA = MT = MG = MG = MA = MA = MG |
| 391 | CO-6322 | MA = M5C = MA = MG = M5C = MG = MT = MG = MG = MA = MT = MT = MA = MA = MT = MA = MT = MG = MG = MA |
| 392 | CO-6323 | MG = MG = MA = M5C = MA = MG = M5C = MG = MT = MG = MG = MA = MT = MT = MA = MA = MT = MA = MT = MG |
| 393 | CO-6324 | MT = MG = MG = MG = MA = d5C = dA = dG = d5C = dG = dT = dG = dG = dA = dT = MT = MA = MA = MT = MA |
| 394 | CO-6325 | MT = MT = MT = M5C = M5C = MA = MG = M5C = MA = MT = MG = MT = M5C = M5C = M5C = M5C = M5C = MA = MG = M5C |
| 395 | CO-6326 | MA = M5C = MT = MT = MT = M5C = M5C = MA = MG = M5C = MA = MT = MG = MT = M5C = M5C = M5C = M5C = M5C = MA |
| 396 | CO-6327 | MA = MG = MA = M5C = MT = MT = MT = M5C = M5C = MA = MG = M5C = MA = MT = MG = MT = M5C = M5C = M5C = M5C |
| 397 | CO-6328 | MT = MG = MG = MG = MA = d5C = dA = dG = M5C = dG = dT = MG = dG = dA = dT = MT = MA = MA = MT = MA |
| 398 | CO-6329 | MT = MG = MG = MG = MA = L5C = dA = dG = L5C = dG = dT = LG = dG = dA = LT = MT = MA = MA = MT = MA |
| 399 | CO-6330 | MT = MG = MG = LG = MA = d5C = dA = LG = d5C = dG = dT = LG = dG = dA = dT = LT = MA = MA = MT = MA |
| 400 | CO-6331 | MT = MG = MG = MG = LA = d5C = dA = dG = L5C = dG = dT = dG = LG = dA = dT = MT = LA = MA = MT = MA |
| 401 | CO-6332 | MT = MG = MG = MG = MA = L5C = MA = MG = L5C = MG = MT = LG = MG = MA = LT = MT = MA = MA = MT = MA |
| 402 | CO-6333 | MT = MG = MG = LG = MA = L5C = MA = LG = M5C = LG = MT = LG = MG = LA = MT = LT = MA = LA = MT = MA |
| 403 | CO-6334 | MT = MG = LG = MG = LA = M5C = LA = MG = L5C = MG = LT = MG = LG = MA = LT = MT = LA = MA = MT = MA |
| 404 | CO-6335 | MT = MG = LG = MG = MA = L5C = MA = MG = L5C = MG = MT = LG = MG = MA = LT = MT = MA = LA = MT = MA |
| 405 | CO-6336 | MT = MG = MG = MG = LA = M5C = MA = MG = L5C = MG = MT = MG = LG = MA = MT = MT = LA = MA = MT = MA |
| 406 | CO-6337 | MT = MG = MG = LG = MA = M5C = MA = LG = M5C = MG = MT = LG = MG = MA = MT = LT = MA = MA = MT = MA |
| 407 | CO-6338 | MT = MG = MG = MG = MA = L5C = MA = MG = M5C = MG = LT = MG = MG = MA = MT = LT = MA = MA = MT = MA |
| 408 | CO-6339 | MT = MG = MG = MG = LA = M5C = MA = MG = M5C = LG = MT = MG = MG = MA = LT = MT = MA = MA = MT = MA |
| 409 | CO-6340 | M5C = MT = MG = MG = MG = MA = d5C = dA = dG = d5C = dG = dT = dG = dG = dA = dT = MT = MA = MA = MT = MA = MT |
| 410 | CO-6341 | M5C = MT = MG = MG = MG = MA = M5C = MA = MG = M5C = MG = MT = MG = MG = MA = MT = MT = MA = MA = MT = MA = MT |
| 411 | CO-6342 | M5C = MT = MG = MG = MG = dA = d5C = dA = MG = d5C = dG = dT = dG = MG = dA = dT = dT = MA = MA = MT = MA = MT |
| 412 | CO-6343 | M5C = MT = MG = MG = MG = LA = d5C = dA = LG = d5C = dG = dT = dG = LG = dA = dT = LT = MA = MA = MT = MA = MT |
| 413 | CO-6344 | MG = M5C = MT = MG = MG = MG = MA = d5C = dA = dG = d5C = dG = dT = dG = dG = dA = dT = MT = MA = MA = MT = MA = MT = MG |
| 414 | CO-6345 | MG = M5C = MT = MG = MG = MG = MA = M5C = MA = MG = M5C = MG = MT = MG = MG = MA = MT = MT = MA = MA = MT = MA = MT = MG |
| 415 | CO-6346 | MG = M5C = MT = MG = MG = dG = dA = M5C = dA = dG = M5C = dG = dT = MG = dG = dA = MT = dT = dA = MA = MT = MA = MT = MG |
| 416 | CO-6347 | MG = M5C = MT = MG = MG = dG = dA = L5C = dA = dG = L5C = dG = dT = LG = dG = dA = LT = dT = dA = MA = MT = MA = MT = MG |
| 262 | CO-6380 | MA = MA = MA = MA = M5C = MA = MA = MA = M5C = MA = M5C = MA = M5C = MA = MA = MG = MT = M5C = M5C = MG |
| 263 | CO-6381 | MT = MG = MA = MT = M5C = MA = MG = M5C = MT = MT = MG = MG = MG = M5C = MG = MA = M5C = MT = MG = MA |
| 264 | CO-6382 | M5C = MT = MA = MT = MG = MA = MT = M5C = MA = MG = M5C = MT = MT = MG = MG = MG = M5C = MG = MA = M5C |
| 265 | CO-6383 | MT = MA = MG = MG = MA = dG = dA = dA = dT = d5C = dG = d5C = dT = dT = dT = MG = MG = MG = MA = MG |
| 266 | CO-6384 | MG = MT = MA = MG = MG = MA = MG = MA = MA = MT = M5C = MG = M5C = MT = MT = MT = MG = MG = MG = MA |
| 267 | CO-6385 | M5C = MG = MG = MT = MA = MG = MG = MA = MG = MA = MA = MT = M5C = MG = M5C = MT = MT = MT = MG = MG |
| 268 | CO-6386 | MG = M5C = MG = MA = MG = M5C = M5C = MA = MG = M5C = MT = M5C = MA = MG = MT = MA = MG = M5C = MT = M5C |
| 200 | CO-6387 | MT = MA = MG = MG = MA = dG = dA = dA = MT = d5C = dG = M5C = dT = dT = dT = MG = MG = MG = MA = MG |
| 201 | CO-6388 | MT = MA = MG = MG = MA = LG = dA = dA = LT = d5C = dG = L5C = dT = dT = LT = MG = MG = MG = MA = MG |
| 202 | CO-6389 | MT = MA = MG = LG = MA = dG = dA = LA = dT = d5C = dG = L5C = dT = dT = dT = LG = MG = MG = MA = MG |
| 203 | CO-6390 | MT = MA = MG = MG = LA = dG = dA = dA = LT = d5C = dG = d5C = LT = dT = dT = MG = LG = MG = MA = MG |
| 204 | CO-6391 | MT = MA = MG = MG = MA = LG = MA = MA = LT = M5C = MG = L5C = MT = MT = LT = MG = MG = MG = MA = MG |
| 205 | CO-6392 | MT = MA = MG = LG = MA = LG = MA = LA = MT = L5C = MG = L5C = MT = LT = MT = LG = MG = LG = MA = MG |
| 206 | CO-6393 | MT = MA = LG = MG = LA = MG = LA = MA = LT = M5C = LG = M5C = LT = MT = LT = MG = LG = MG = MA = MG |
| 207 | CO-6394 | MT = MA = LG = MG = MA = LG = MA = MA = LT = M5C = MG = L5C = MT = MT = LT = MG = MG = LG = MA = MG |
| 208 | CO-6395 | MT = MA = MG = MG = LA = MG = MA = MA = LT = M5C = MG = M5C = LT = MT = MT = MG = LG = MG = MA = MG |
| 209 | CO-6396 | MT = MA = MG = LG = MA = MG = MA = LA = MT = M5C = MG = L5C = MT = MT = MT = LG = MG = MG = MA = MG |
| 210 | CO-6397 | MT = MA = MG = MG = MA = LG = MA = MA = MT = M5C = LG = M5C = MT = MT = MT = LG = MG = MG = MA = MG |
| 211 | CO-6398 | MT = MA = MG = MG = LA = MG = MA = MA = MT = L5C = MG = M5C = MT = MT = LT = MG = MG = MG = MA = MG |
| 212 | CO-6399 | MG = MT = MA = MG = MG = MA = dG = dA = dA = dT = d5C = dG = d5C = dT = dT = dT = MG = MG = MG = MA = MG = M5C |
| 213 | CO-6400 | MG = MT = MA = MG = MG = MA = MG = MA = MA = MT = M5C = MG = M5C = MT = MT = MT = MG = MG = MG = MA = MG = M5C |
| 214 | CO-6401 | MG = MT = MA = MG = MG = dA = dG = dA = MA = dT = d5C = dG = d5C = MT = dT = dT = dG = MG = MG = MA = MG = M5C |
| 215 | CO-6402 | MG = MT = MA = MG = MG = LA = dG = dA = LA = dT = d5C = dG = d5C = LT = dT = dT = LG = MG = MG = MA = MG = M5C |
| 216 | CO-6403 | MG = MG = MT = MA = MG = MG = MA = dG = dA = dA = dT = d5C = dG = d5C = dT = dT = dT = MG = MG = MG = MA = MG = M5C = MA |
| 217 | CO-6404 | MG = MG = MT = MA = MG = MG = MA = MG = MA = MA = MT = M5C = MG = M5C = MT = MT = MT = MG = MG = MG = MA = MG = M5C = MA |
| 218 | CO-6405 | MG = MG = MT = MA = MG = dG = dA = MG = dA = dA = MT = d5C = dG = M5C = dT = dT = MT = dG = dG = MG = MA = MG = M5C = MA |
| 219 | CO-6406 | MG = MG = MT = MA = MG = dG = dA = LG = dA = dA = LT = d5C = dG = L5C = dT = dT = LT = dG = dG = MG = MA = MG = M5C = MA |
| 220 | CO-6407 | MT = MA = MG − MG − MA − MG = MA = MA = MT = M5C = MG = M5C = MT = MT = MT − MG − MG − MG = MA = MG |
| 221 | CO-6408 | MT = MA = MG = MG − MA − MG − MA = MA = MT = M5C = MG = M5C = MT = MT − MT − MG − MG = MG = MA = MG |
| 222 | CO-6409 | MT = MA = MG − MG = MA = MG − MA = MA = MT − M5C = MG = M5C − MT = MT = MT − MG = MG = MG − MA = MG |
| 223 | CO-6410 | MT = MA − MG = MG = MA − MG = MA = MA − MT = M5C = MG − M5C = MT = MT − MT = MG = MG − MG = MA = MG |
| 224 | CO-6411 | MT = MA = MG − MG − MA = MG = MA = MA = MT = M5C = MG = M5C = MT = MT = MT = MG − MG − MG = MA = MG |
| 991 | CO-6412 | MG = MG = MA = M5C = MT = dT = dG = dG = dG = dA = dG = dT = dG = dG = dT = dG = MA = M5C = MT = MG = MA |
| 992 | CO-6413 | MG = MG = MA = M5C = MT = dT = dG = dG = MG = dA = dG = dT = MG = dG = dT = dG = MA = M5C = MT = MG = MA |
| 993 | CO-6414 | MG = MG = MA = L5C = MT = LT = MG = LG = MG = LA = MG = LT = MG = LG = MT = LG = MA = L5C = MT = MG = MA |
| 994 | CO-6415 | MG = MG = MA = L5C = MT = MT = LG = MG = MG = LA = MG = MT = LG = MG = MT = LG = MA = M5C = LT = MG = MA |
| 995 | CO-6416 | MG = MG = LA = M5C = MT = LT = MG = MG = LG = MA = MG = LT = MG = MG = LT = MG = MA = L5C = MT = MG = MA |
| 996 | CO-6417 | MG = MG = MA = M5C = LT = MT = MG = MG = LG = MA = MG = MT = LG = MG = MT = MG = LA = M5C = MT = MG = MA |
| 997 | CO-6418 | MG = MG = MA = M5C = MT = LT = MG = MG = MG = MA = LG = MT = MG = MG = MT = LG = MA = M5C = MT = MG = MA |
| 998 | CO-6419 | MG = MG = MA = M5C = MT = dT = dG = dG = dG = dA = dG = dT = dG = dG = dT = dG = dA = d5C = MT = MG = MA = MA = M5C |
| 999 | CO-6420 | MG = MG = LA = M5C = MT = LT = MG = MG = LG = MA = MG = LT = MG = MG = LT = MG = MA = L5C = MT = MG = LA = MA = M5C |
| 1000 | CO-6421 | MG = MG = MA = M5C = MT = LT = MG = MG = MG = MA = MG = LT = MG = MG = MT = MG = MA = L5C = MT = MG = MA = MA = M5C |
| 1001 | CO-6422 | MG = MG = MA = L5C = MT = MT = MG = LG = MG = MA = MG = LT = MG = MG = MT = LG = MA = M5C = MT = LG = MA = MA = M5C |
| 1002 | CO-6423 | MG = MG = MA = M5C = LT = MT = MG = MG = MG = LA = MG = MT = MG = MG = LT = MG = MA = M5C = MT = LG = MA = MA = M5C |
| 1003 | CO-6424 | MG = MG = MA = L5C = MT = MT = MG = MG = LG = MA = MG = MT = MG = LG = MT = MG = MA = M5C = LT = MG = MA = MA = M5C |
| 1004 | CO-6425 | MG = MG = MG = MA = M5C = MT = MT = MG = MG = MG = MA = MG = MT = MG = MG = MT = MG = MA = M5C = MT = MG = MA = MA = M5C |
| 1005 | CO-6426 | MG = MG = MA = M5C = MT = MT = MG = MG = MG = MA = MG = MT = MG = MG = MT = MG = MA = M5C = MT = MG = MA = MA = M5C = M5C |
| 1006 | CO-6427 | MG = MG = MG = MA = M5C = MT = MT = MG = MG = MG = MA = MG = MT = MG = MG = MT = MG = MA = M5C = MT = MG = MA = MA = M5C = M5C |
| 1007 | CO-6428 | MG = MG = MG = MA = M5C = MT = MT = MG = MG = MG = MA = MG = MT = MG = MG = MT = MG = MA = M5C = MT = MG = MA = MA = M5C = M5C = MT |
| 1008 | CO-6429 | MA = MG = MG = MG = MA = M5C = MT = MT = MG = MG = MG = MA = MG = MT = MG = MG = MT = MG = MA = M5C = MT = MG = MA = MA = M5C = M5C |
| 4917 | CO-6430 | MT = MG = M5C = MG = M5C = MA = M5C = MA = M5C = MA = MG = MG = MT = MA = M5C = M5C = MA = MG = MA = MG |
| 4918 | CO-6431 | MA = M5C = MG = MG = MA = M5C = M5C = MT = M5C = M5C = MT = M5C = MA = M5C = MT = MA = MA = MG = M5C = MT |
| 4919 | CO-6432 | MG = MA = MG = MA = MA = M5C = MG = M5C = MT = MA = M5C = M5C = MA = M5C = MG = MG = MA = M5C = M5C = MT |
| 4920 | CO-6433 | MG = M5C = MA = M5C = MT = MG = M5C = MT = MG = M5C = M5C = M5C = M5C = M5C = MA = MA = MG = MA = M5C = MA |
| 4921 | CO-6434 | MT = M5C = M5C = MG = MA = MT = M5C = MA = M5C = M5C = MT = MG = M5C = MA = M5C = MT = MG = M5C = MT = MG |
| 4922 | CO-6435 | MA = MG = MG = M5C = M5C = MA = M5C = M5C = MT = MG = M5C = MT = MG = M5C = MT = M5C = M5C = MG = MA = MT |
| 4923 | CO-6436 | MT = MG = MT = M5C = M5C = M5C = M5C = MA = M5C = MT = M5C = MA = MG = MG = M5C = M5C = MA = M5C = M5C = MT |
| 4924 | CO-6437 | MG = MA = M5C = MA = MA = MA = MG = MA = M5C = M5C = M5C = MA = M5C = M5C = M5C = M5C = MT = MG = MT = M5C |
| 4925 | CO-6438 | M5C = MT = MA = M5C = MT = MG = MA = MG = M5C = M5C = MT = MG = MG = MA = MA = MG = MT = MG = MA = M5C |
| 4926 | CO-6439 | MG = M5C = MT = M5C = M5C = M5C = MT = MG = MT = MG = MT = MG = M5C = MT = MA = M5C = MT = MG = MA = MG |
| 4927 | CO-6440 | MG = MT = MT = M5C = MA = MT = MG = M5C = MT = MA = M5C = M5C = M5C = M5C = M5C = MT = MA = MG = MT = MG |
| 4928 | CO-6441 | MG = MG = M5C = MT = MG = MA = MT = MG = M5C = MA = MG = MG = MG = MT = MT = M5C = MA = MT = MG = M5C |
| 4929 | CO-6442 | M5C = MT = MG = MG = MG = MA = MG = M5C = M5C = MT = MG = MG = M5C = MT = MG = MA = MT = MG = M5C = MA |
| 4930 | CO-6443 | MG = M5C = M5C = M5C = MT = MG = MA = M5C = MA = M5C = MG = M5C = MA = M5C = M5C = MT = MT = MA = M5C = MA |
| 4931 | CO-6444 | MT = MG = M5C = M5C = M5C = MA = MA = MT = MG = M5C = M5C = M5C = MA = MA = M5C = MG = MT = MG = MA = MG |
| 4932 | CO-6445 | MG = MT = MG = MG = MG = MA = MA = MG = MT = MA = MT = MG = MG = M5C = MT = MG = M5C = MT = MG = M5C |
| 4933 | CO-6446 | MT = MG = M5C = MT = MG = MT = MG = MA = MG = M5C = MT = MG = M5C = M5C = M5C = MA = MG = MT = MG = MG |
| 4934 | CO-6447 | MA = MT = MG = MG = MT = MT = M5C = MT = MA = M5C = M5C = MT = MG = M5C = MT = MG = MT = MG = MA = MG |
| 4935 | CO-6448 | MT = M5C = M5C = M5C = MG = MG = MT = MG = M5C = M5C = M5C = MT = MG = MA = MT = MG = MG = MT = MT = M5C |
| 4936 | CO-6449 | MG = MT = M5C = M5C = MA = MG = M5C = MT = M5C = MG = MG = MT = M5C = MA = MT = MG = MT = MG = MT = M5C |
| 4937 | CO-6450 | M5C = MA = MG = MT = MG = MG = M5C = M5C = MT = MT = MG = MT = M5C = M5C = MA = MG = M5C = MT = M5C = MG |
| 4938 | CO-6451 | MA = M5C = MG = MT = MT = MT = MG = M5C = MT = M5C = M5C = MT = M5C = MT = MT = M5C = M5C = MA = MG = MT |
| 4939 | CO-6452 | MT = MG = MG = M5C = MT = MG = M5C = M5C = M5C = M5C = MT = M5C = MA = M5C = MG = MT = MT = MT = MG = M5C |
| 4940 | CO-6453 | MG = MA = MA = MA = MA = MA = MG = MT = MT = MT = M5C = M5C = MT = M5C = M5C = MA = MT = M5C = M5C = MT |
| 4941 | CO-6454 | M5C = M5C = MA = MA = MG = MT = MG = MT = MA = MG = MG = MA = MA = MA = MA = MA = MG = MT = MT = MT |
| 4942 | CO-6455 | M5C = MT = M5C = MA = MT = MT = MG = MA = M5C = MT = M5C = M5C = MA = MA = MG = MT = MG = MT = MA = MG |
| 1009 | CO-6512 | MT = MA = MG − MG − MA − MG − MA = MA = MT = M5C = MG = M5C − MT = MT = MT = MG = MG = MG = MA = MG |
| 1010 | CO-6513 | MT = MA = MG − MG − MA − MG − MA − MA − MT = M5C = MG = M5C = MT = MT = MT = MG = MG = MG = MA = MG |
| 1011 | CO-6514 | MT = MA = MG − MG − MA − MG − MA − MA − MT − M5C − MG = M5C = MT = MT = MT = MG = MG = MG = MA = MG |
| 1012 | CO-6515 | MT = MA = MG − MG − MA − MG − MA − MA − MT − M5C − MG − M5C − MT = MT = MT = MG = MG = MG = MA = MG |
| 1013 | CO-6516 | MT = MA = MG − MG − MA − MG − MA − MA − MT − M5C − MG − M5C − MT − MT − MT = MG = MG = MG = MA = MG |
| 1014 | CO-6517 | MT = MA = MG − MG − MA − MG − MA − MA − MT − M5C − MG − M5C − MT − MT − MT − MG − MG = MG = MA = MG |
| 1015 | CO-6518 | MT = MA = MG = MG − MA − MG − MA − MA − MT − M5C − MG − M5C − MT − MT − MT − MG − MG − MG = MA = MG |
| 1016 | CO-6519 | MT = MA = MG = MG = MA = MG − MA − MA − MT − M5C − MG − M5C − MT − MT − MT − MG − MG − MG = MA = MG |
| 1017 | CO-6520 | MT = MA = MG = MG = MA = MG = MA = MA − MT − M5C − MG − M5C − MT − MT − MT − MG − MG − MG = MA = MG |
| 225 | CO-6521 | MT = MA = MG = MG = MA = MG = MA = MA = MT = M5C − MG − M5C − MT − MT − MT − MG − MG − MG = MA = MG |
| 226 | CO-6522 | MT = MA = MG = MG = MA = MG = MA = MA = MT = M5C = MG = M5C − MT − MT − MT − MG − MG − MG = MA = MG |
| 227 | CO-6523 | MT = MA = MG = MG = MA = MG = MA = MA = MT = M5C = MG = M5C = MT = MT − MT − MG − MG − MG = MA = MG |
| 4943 | CO-6524 | mG = MG = MA = MC = MU = MU = MG = MG = MG = MA = MG = MU = MG = MG = MU = MG = MA = MC = MU = MG |
| 4944 | CO-6525 | mG = MG = MA = MC = MU = MU = MG = MG = MG = MA = MG = MU = MG = MG = MU = MG = MA = MC = MU = MG = MA = MA = MC |
| 4945 | CO-6526 | mG = MG = MA − MC − MU = MU = MG = MG = MG = MA = MG = MU = MG = MG = MU = MG − MA − MC = MU = MG |
| 4946 | CO-6527 | mG = MG = MA = MC = MU = MU = MG − MG − MG − MA − MG − MU − MG − MG − MU − MG − MA = MC = MU = MG |
| 4947 | CO-6528 | mG = MG = MA = MC = MU = MU = MG = MG = MG − MA − MG − MU − MG − MG − MU − MG − MA = MC = MU = MG |
| 4948 | CO-6529 | mG = MG = MA = MC = MU = MU = MG = MG = MG = MA = MG − MU − MG − MG − MU − MG − MA = MC = MU = MG |
| 4949 | CO-6530 | mG = MG = MA = MC = MU = MU = MG = MG = MG = MA = MG = MU = MG − MG − MU − MG − MA = MC = MU = MG |
| 1018 | CO-7262 | M5C = MT = M5C = M5C = MT = M5C = M5C = MT = MT = MA = M5C = MT = MT = M5C = M5C = MT = M5C = MT = MT = MG |
| 1019 | CO-7263 | MT = MG = MG = M5C = MT = M5C = M5C = MT = M5C = M5C = MT = MT = MA = M5C = MT = MT = M5C = M5C = MT = M5C |
| 1020 | CO-7264 | MG = MT = M5C = MT = MG = MG = M5C = MT = M5C = M5C = MT = M5C = M5C = MT = MT = MA = M5C = MT = MT = M5C |
| 1021 | CO-7265 | M5C = MT = MG = MG = MT = M5C = MT = MG = MG = M5C = MT = M5C = M5C = MT = M5C = M5C = MT = MT = MA = M5C |
| 1022 | CO-7266 | MA = MA = M5C = M5C = MT = MG = MG = MT = M5C = MT = MG = MG = M5C = MT = M5C = M5C = MT = M5C = M5C = MT |
| 1023 | CO-7267 | MG = MA = M5C = MT = MG = MA = MA = M5C = M5C = MT = MG = MG = MT = M5C = MT = MG = MG = M5C = MT = M5C |
| 1024 | CO-7268 | MT = MG = MG = MT = MG = MA = M5C = MT = MG = MA = MA = M5C = M5C = MT = MG = MG = MT = M5C = MT = MG |
| 1025 | CO-7269 | MG = MT = MG = MG = MT = MG = MA = M5C = MT = MG = MA = MA = M5C = M5C = MT = MG = MG = MT = M5C = MT |
| 1026 | CO-7270 | M5C = MT = M5C = MG = MA = MA = MG = MG = MT = MA = MG = MT = MA = MG = MG = MG = MA = M5C = MT = MT |
| 1027 | CO-7271 | MT = MT = M5C = MT = M5C = MG = MA = MA = MG = MG = MT = MA = MG = MT = MA = MG = MG = MG = MA = M5C |
| 1028 | CO-7272 | MT = MT = MG = MG = M5C = MT = MT = M5C = MT = M5C = MG = MA = MA = MG = MG = MT = MA = MG = MT = MA |
| 1029 | CO-7273 | MA = MA = M5C = MG = MA = MG = MA = M5C = M5C = MT = MG = MA = MG = MA = M5C = M5C = MT = MT = MG = MG |
| 1030 | CO-7274 | MG = MG = MA = M5C = MT = MT = MG = MG = MG = MA = MG = MT = MG = MG = MT = MG = MA = M5C = MT = M5C |
| 1031 | CO-7280 | MG = MG = MA = M5C = MT = MT = MG = MG = MG = MA = MG = MT = MG = MG = MT = MG = MA = M5C = MT = MA |
| 1032 | CO-7281 | MG = MG = MA = M5C = MT = MT = MG = MG = MG = MA = MG = MT = MG = MG = MT = MG = MA = M5C = MT = MT |
| 1033 | CO-7310 | MG = M5C = M5C = MT = MT = MG = MG = MG = MG = MG = MG = M5C = MT = MG = M5C = MG = MG = MT = MA = MG |
| 1034 | CO-7311 | M5C = MG = M5C = M5C = MT = MT = MG = MG = MG = MG = MG = MG = M5C = MT = MG = M5C = MG = MG = MT = MA |
| 1035 | CO-7312 | MG = M5C = MG = M5C = M5C = MT = MT = MG = MG = MG = MG = MG = MG = M5C = MT = MG = M5C = MG = MG = MT |
| 1036 | CO-7313 | MA = MG = M5C = MG = M5C = M5C = MT = MT = MG = MG = MG = MG = MG = MG = M5C = MT = MG = M5C = MG = MG |
| 1037 | CO-7314 | M5C = MA = MG = M5C = MG = M5C = M5C = MT = MT = MG = MG = MG = MG = MG = MG = M5C = MT = MG = M5C = MG |
| 1038 | CO-7315 | M5C = M5C = MA = MG = M5C = MG = M5C = M5C = MT = MT = MG = MG = MG = MG = MG = MG = M5C = MT = MG = M5C |
| 1039 | CO-7316 | M5C = MA = MG = M5C = MT = M5C = MA = MG = MT = MA = MG = M5C = MT = M5C = MA = M5C = MA = MT = MT = MT |
| 1040 | CO-7317 | M5C = M5C = MA = MG = M5C = MT = M5C = MA = MG = MT = MA = MG = M5C = MT = M5C = MA = M5C = MA = MT = MT |
| 1041 | CO-7694 | MT = MT = M5C = LT = M5C = LG = MA = LA = MG = LG = MT = LA = MG = LT = MA = LG = MG = LG = MA = M5C |
| 1042 | CO-7695 | MT = MT = L5C = MT = L5C = MG = LA = MA = LG = MG = LT = MA = LG = MT = LA = MG = LG = MG = MA = M5C |
| 1043 | CO-7696 | MT = MT = L5C = MT = M5C = LG = MA = MA = LG = MG = MT = LA = MG = MT = LA = MG = MG = LG = MA = M5C |
| 1044 | CO-7697 | MT = MT = M5C = MT = L5C = MG = MA = MA = LG = MG = MT = MA = LG = MT = MA = MG = LG = MG = MA = M5C |
| 1045 | CO-7698 | MT = MT = M5C = LT = M5C = MG = MA = LA = MG = MG = MT = LA = MG = MT = MA = LG = MG = MG = MA = M5C |
| 1046 | CO-7699 | MT = MT = M5C = MT = M5C = LG = MA = MA = MG = MG = LT = MA = MG = MT = MA = LG = MG = MG = MA = M5C |
| 1047 | CO-7700 | MT = MT = M5C = MT = L5C = MG = MA = MA = MG = LG = MT = MA = MG = MT = LA = MG = MG = MG = MA = M5C |
| 1048 | CO-7701 | MT = MT = M5C = MT − M5C − MG = MA = MA = MG = MG = MT = MA = MG = MT = MA − MG − MG = MG = MA = M5C |
| 1049 | CO-7702 | MT = MT = M5C − MT − M5C − MG = MA = MA = MG = MG = MT = MA = MG = MT = MA − MG − MG − MG = MA = M5C |
| 1050 | CO-7703 | MT = MT − M5C − MT − M5C − MG = MA = MA = MG = MG = MT = MA = MG = MT = MA − MG − MG − MG − MA = M5C |
| 1051 | CO-7704 | MT − MT − M5C − MT − M5C − MG = MA = MA = MG = MG = MT = MA = MG = MT = MA − MG − MG − MG − MA − M5C |
| 1052 | CO-7705 | MT = MT = M5C = MT = M5C − MG − MA − MA − MG − MG − MT − MA − MG − MT − MA − MG − MG = MG = MA = M5C |
| 1053 | CO-7706 | MT = MT = MG = LG = M5C = LT = MT = L5C = MT = L5C = MG = LA = MA = LG = MG = LT = MA = LG = MT = MA |
| 1054 | CO-7707 | MT = MT = LG = MG = L5C = MT = LT = M5C = LT = M5C = LG = MA = LA = MG = LG = MT = LA = MG = MT = MA |
| 1055 | CO-7708 | MT = MT = LG = MG = M5C = LT = MT = M5C = LT = M5C = MG = LA = MA = MG = LG = MT = MA = LG = MT = MA |
| 1056 | CO-7709 | MT = MT = MG = MG = L5C = MT = MT = M5C = LT = M5C = MG = MA = LA = MG = MG = MT = LA = MG = MT = MA |
| 1057 | CO-7710 | MT = MT = MG = LG = M5C = MT = MT = L5C = MT = M5C = MG = LA = MA = MG = MG = LT = MA = MG = MT = MA |
| 1058 | CO-7711 | MT = MT = MG = MG = M5C = LT = MT = M5C = MT = M5C = LG = MA = MA = MG = MG = LT = MA = MG = MT = MA |
| 1059 | CO-7712 | MT = MT = MG = MG = L5C = MT = MT = M5C = MT = L5C = MG = MA = MA = MG = LG = MT = MA = MG = MT = MA |
| 1060 | CO-7713 | MT = MT = MG = MG − M5C − MT = MT = M5C = MT = M5C = MG = MA = MA = MG = MG − MT − MA = MG = MT = MA |
| 1061 | CO-7714 | MT = MT = MG − MG − M5C − MT = MT = M5C = MT = M5C = MG = MA = MA = MG = MG − MT − MA − MG = MT = MA |
| 1062 | CO-7715 | MT = MT − MG − MG − M5C − MT = MT = M5C = MT = M5C = MG = MA = MA = MG = MG − MT − MA − MG − MT = MA |
| 1063 | CO-7716 | MT − MT − MG − MG − M5C − MT = MT = M5C = MT = M5C = MG = MA = MA = MG = MG − MT − MA − MG − MT − MA |
| 1064 | CO-7717 | MT = MT = MG = MG = M5C − MT − MT − M5C − MT − M5C − MG − MA − MA − MG − MG − MT − MA = MG = MT = MA |
| 1065 | CO-7730 | M5C = MT = MT = M5C = MT = M5C = MG = MA = MA = MG = MG = MT = MA = MG = MT = MA = MG = MG = MG = MA = M5C = MT |
| 1066 | CO-7731 | M5C = MT = MT = M5C = MT = L5C = MG = MA = LA = MG = MG = MT = MA = LG = MT = MA = LG = MG = MG = MA = M5C = MT |
| 1067 | CO-7732 | MG = M5C = MT = MT = M5C = MT = M5C = MG = MA = MA = MG = MG = MT = MA = MG = MT = MA = MG = MG = MG = MA = M5C = MT = MT |
| 1068 | CO-7733 | MG = M5C = MT = MT = L5C = MT = M5C = LG = MA = MA = LG = MG = MT = LA = MG = MT = LA = MG = MG = LG = MA = M5C = MT = MT |
| 1069 | CO-7734 | M5C = MT = MT = MG = MG = M5C = MT = MT = M5C = MT = M5C = MG = MA = MA = MG = MG = MT = MA = MG = MT = MA = MG |
| 1070 | CO-7735 | M5C = MT = MT = MG = MG = L5C = MT = MT = L5C = MT = M5C = MG = MA = LA = MG = MG = LT = MA = MG = MT = MA = MG |
| 1071 | CO-7736 | M5C = M5C = MT = MT = MG = MG = M5C = MT = MT = M5C = MT = M5C = MG = MA = MA = MG = MG = MT = MA = MG = MT = MA = MG = MG |
| 1072 | CO-7737 | M5C = M5C = MT = MT = LG = MG = M5C = LT = MT = M5C = LT = M5C = MG = LA = MA = MG = LG = MT = MA = LG = MT = MA = MG = MG |
| 1073 | CO-7760 | MG = MG = MA = M5C = MT = LT = MG = MG = LG = MA = MG = LT = MG = MG = LT = MG = MA = M5C = MT = MG − dT − dT − dT − dT − dT − |
| | | dT − dT − dT − dT − dT − .BioTEG |
| 1074 | CO-7762 | MG − MG − MA − M5C − MT − LT − MG − MG − LG − MA − MG − LT − MG − MG − LT − MG − MA − M5C − MT − MG − dT − dT − dT − dT − dT − dT − dT − dT − |
| | | dT − dT − .BioTEG |
| 1075 | CO-7764 | M5C = M5C = M5C = M5C = MT = dT = dG = dG = d5C = dA = d5C = dT = d5C = dG = dG = MA = MG = MT = MT = MG |
| 1076 | CO-7765 | MG = M5C = MA = MG = M5C = dT = dA = dG = dG = dT = dT = dG = dG = d5C = dT = M5C = M5C = M5C = M5C = MT |
| 1077 | CO-7766 | MT = MT = MG = M5C = MG = dG = dG = dT = dG = dG = dG = dA = d5C = dG = dA = MG = M5C = MT = MA = MG |
| 1078 | CO-7767 | MG = MG = MT = MG = MA = d5C = dT = dG = dA = dA = d5C = d5C = dT = dG = dG = MT = M5C = MT = MG = MG |
| 1079 | CO-7768 | M5C = MG = MA = MA = MG = dG = dT = dA = dG = dT = dA = dG = dG = dG = dA = M5C = MT = MT = MG = MG |
| 1080 | CO-7769 | MA = M5C = MG = MA = MG = dA = d5C = d5C = dT = dG = dA = dG = dA = d5C = d5C = MT = MT = MG = MG = M5C |
| 1081 | CO-7770 | MT = MA = MG = MG = MT = dG = d5C = dT = dG = dG = d5C = dT = dT = d5C = dT = MT = M5C = M5C = M5C = M5C |
| 1082 | CO-7771 | MA = M5C = M5C = MA = MT = dT = d5C = dT = dT = dG = dA = d5C = d5C = d5C = dA = MG = M5C = MT = M5C = M5C |
| 1083 | CO-7772 | MG = M5C = MA = MG = MT = dG = dA = d5C = dG = d5C = d5C = d5C = d5C = dG = dT = MT = MA = MG = MA = MA |
| 1084 | CO-7773 | MG = MA = MG = MA = M5C = dA = dA = d5C = dA = dG = dA = dA = dG = dA = dA = M5C = M5C = MG = M5C = MT |
| 1085 | CO-7774 | MG = M5C = M5C = MA = MT = dG = dT = dG = dA = dG = d5C = dT = dT = dG = dA = MG = MG = MT = MT = M5C |
| 1086 | CO-7775 | MG = MG = MA = MG = MT = d5C = dG = dG = dA = d5C = dG = d5C = dA = dG = dG = MT = MA = MG = MG = MA |
| 1087 | CO-7776 | MG = MG = MG = MT = M5C = dT = dG = dT = dA = dG = dT = d5C = dT = dG = dA = MG = M5C = MG = M5C = MT |
| 1088 | CO-7777 | MT = MG = MG = MA = MA = dA = d5C = dT = dG = dA = dG = dG = dT = dA = dG = MG = M5C = MG = MG = MG |
| 1089 | CO-7778 | MA = MG = M5C = M5C = MA = dA = dT = dG = dG = dG = dA = dG = d5C = dG = dG = MG = MT = MA = MG = M5C |
| 1090 | CO-7779 | MG = MG = M5C = MT = MG = dG = d5C = d5C = d5C = d5C = dA = d5C = d5C = dT = d5C = MT = MA = MT = MA = MT |
| 1091 | CO-7780 | MA = MG = MG = MA = MG = dA = dG = dT = dG = dA = dT = dT = dT = dG = dA = MG = MT = MA = MG = MA |
| 1092 | CO-7781 | MG = M5C = MT = MG = MT = d5C = d5C = d5C = dG = dA = d5C = dG = dT = d5C = dA = M5C = MA = MT = MG = MA |
| 1093 | CO-7782 | MG = MG = MG = MT = MT = dA = dA = dG = dG = dA = dA = dG = dG = d5C = dG = MA = M5C = MG = MA = MG |
| 1094 | CO-7783 | MT = MA = MG = M5C = MA = dA = dA = d5C = dT = d5C = d5C = d5C = d5C = d5C = dA = MG = MG = M5C = MG = M5C |
| 1095 | CO-7784 | MG = M5C = M5C = M5C = M5C = dA = dG = dA = d5C = dA = d5C = dG = d5C = dG = d5C = MT = MA = MT = M5C = MA |
| 1096 | CO-7785 | MG = MG = M5C = MA = MG = dG = dA = dT = dA = dG = dG = dA = dT = dA = dG = MG = MA = MG = M5C = MG |
| 1097 | CO-7786 | MT = MG = M5C = M5C = MT = dA = dG = d5C = dA = dT = dG = dT = d5C = dA = dA = M5C = M5C = MG = MA = MG |
| 1098 | CO-7787 | M5C = MA = MT = M5C = M5C = dT = dT = d5C = dA = dA = d5C = dT = d5C = dA = d5C = MT = M5C = MT = MG = MG |
| 1099 | CO-7788 | MG = MG = M5C = MT = MG = dT = dT = dT = dA = dT = d5C = dT = dT = dT = dG = MT = M5C = M5C = MT = MG |
| 1100 | CO-7789 | MT = MG = MT = M5C = M5C = dT = dG = d5C = dT = dG = dA = dG = d5C = dA = d5C = M5C = MT = MT = MG = MA |
| 1101 | CO-7790 | MG = MA = MT = MT = M5C = dA = dG = d5C = d5C = dT = dG = dA = dG = dA = d5C = MT = MG = MT = M5C = MT |
| 1102 | CO-7791 | MG = M5C = MA = MA = M5C = dT = dG = dG = d5C = dG = d5C = dA = d5C = dA = dA = M5C = M5C = MT = MT = MG |
| 1103 | CO-7792 | MG = MA = M5C = MA = MA = dT = d5C = dT = dA = d5C = dT = dT = d5C = d5C = dT = M5C = MT = M5C = M5C = M5C |
| 1104 | CO-7793 | MA = MA = MT = M5C = MT = dT = d5C = d5C = d5C = dA = dG = dA = d5C = dT = d5C = MA = MG = M5C = MT = M5C |
| 1105 | CO-7794 | MG = M5C = MT = M5C = MT = dT = d5C = d5C = d5C = dA = dA = d5C = dA = d5C = d5C = MT = M5C = M5C = MT = M5C |
| 1106 | CO-7795 | MG = M5C = M5C = MT = MG = d5C = d5C = d5C = dT = dT = d5C = d5C = d5C = dA = dT = M5C = MT = MG = MG = MT |
| 1107 | CO-7796 | MG = MG = MA = MG = MA = d5C = dT = dA = dG = dG = dA = dA = dG = d5C = d5C = MA = M5C = MT = MT = M5C |
| 1108 | CO-7797 | MA = MT = MA = MT = M5C = dA = dA = dT = dT = d5C = d5C = dT = d5C = dG = dA = MA = MG = MG = M5C = MA |
| 1109 | CO-7798 | MG = MG = M5C = MT = MA = dA = dT = d5C = dT = dG = dT = dT = d5C = dT = dG = MT = MG = MG = MT = MA |
| 1110 | CO-7799 | M5C = MT = MG = MG = M5C = d5C = d5C = dA = dT = d5C = dT = d5C = d5C = d5C = dA = MT = M5C = MA = MT = M5C |
| 1111 | CO-7800 | MG = MT = MT = M5C = M5C = dT = d5C = d5C = dA = d5C = dG = dG = d5C = d5C = d5C = MA = MG = MT = MA = MT |
| 1112 | CO-7801 | MG = M5C = MT = MG = M5C = dA = dG = d5C = dA = dG = dT = d5C = dT = d5C = d5C = MA = MT = M5C = M5C = M5C |
| 1113 | CO-7802 | MA = MT = M5C = M5C = MT = d5C = dA = dG = d5C = dT = d5C = d5C = dA = dG = dT = MT = M5C = M5C = MT = MT |
| 1114 | CO-7803 | M5C = MG = MA = M5C = MT = dT = d5C = dT = dG = d5C = dT = dG = d5C = d5C = dT = M5C = MG = MA = MG = M5C |
| 1115 | CO-7804 | MT = M5C = MG = MG = MT = dT = dG = dG = d5C = dA = d5C = d5C = d5C = dT = dT = MT = M5C = M5C = M5C = MT |
| 1116 | CO-7805 | MT = M5C = M5C = MA = MG = dG = d5C = dT = dT = dA = dG = dA = dA = d5C = d5C = M5C = M5C = MT = MG = M5C |
| 1117 | CO-7806 | MT = MG = MT = M5C = MT = dT = dA = dT = d5C = d5C = dG = d5C = dT = dG = dT = M5C = MT = MG = MG = MG |
| 1118 | CO-7807 | MG = MG = M5C = MA = M5C = dA = dG = dA = d5C = dT = dA = dG = dT = dA = d5C = MT = MA = MG = MG = MT |
| 1119 | CO-7808 | M5C = MT = MA = MG = MT = d5C = dT = d5C = dA = dA = dG = dA = dT = dA = d5C = MA = M5C = MA = MG = MG |
| 1120 | CO-7809 | MG = MT = MG = MG = MT = dT = dG = dT = dA = dA = dT = dT = dA = dG = dT = MA = MG = MG = MT = MT |
| 1121 | CO-7810 | M5C = MA = M5C = MG = MG = d5C = dT = dT = dT = dG = dA = d5C = dG = dA = dT = MT = MA = MG = MA = M5C |
| 1122 | CO-7811 | M5C = M5C = MT = MA = MA = dA = dT = dG = dT = d5C = d5C = d5C = dT = dG = dG = M5C = M5C = MG = MG = M5C |
| 1123 | CO-7812 | MG = MT = M5C = M5C = M5C = dT = d5C = d5C = dA = d5C = d5C = d5C = dT = dG = dA = MG = MT = MT = MG = MT |
| 1124 | CO-7813 | MG = MT = MT = M5C = MT = dG = dT = dG = dT = dG = dT = d5C = dG = dT = dG = MT = MG = MA = MT = MG |
| 1125 | CO-7814 | MG = MA = MG = MT = M5C = dT = d5C = dA = dG = d5C = dA = d5C = dT = dA = dT = MT = MG = MA = M5C = M5C |
| 1126 | CO-7815 | M5C = MG = MT = MT = MA = dT = d5C = dG = dT = dG = dG = d5C = dA = d5C = d5C = MT = MT = MA = M5C = M5C |
| 1127 | CO-7816 | MG = MA = MT = MG = M5C = dT = dG = d5C = dA = dT = dA = dA = d5C = dT = d5C = MT = M5C = MT = MT = MA |
| 1128 | CO-7817 | MG = MG = MA = M5C = MA = dT = dA = dA = dG = dG = d5C = dT = dG = d5C = d5C = MT = MT = M5C = MT = MG |
| 1129 | CO-7818 | MG = MT = MT = MA = MG = dG = dG = dA = dG = dG = dG = dT = dG = dA = d5C = MT = MG = M5C = MT = MA |
| 1130 | CO-7819 | M5C = M5C = M5C = M5C = MT = MT = MG = MG = M5C = MA = M5C = MT = M5C = MG = MG = MA = MG = MT = MT = MG |
| 1131 | CO-7820 | MG = M5C = MA = MG = M5C = MT = MA = MG = MG = MT = MT = MG = MG = M5C = MT = M5C = M5C = M5C = M5C = MT |
| 1132 | CO-7821 | MT = MT = MG = M5C = MG = MG = MG = MT = MG = MG = MG = MA = M5C = MG = MA = MG = M5C = MT = MA = MG |
| 1133 | CO-7822 | MG = MG = MT = MG = MA = M5C = MT = MG = MA = MA = M5C = M5C = MT = MG = MG = MT = M5C = MT = MG = MG |
| 1134 | CO-7823 | M5C = MG = MA = MA = MG = MG = MT = MA = MG = MT = MA = MG = MG = MG = MA = M5C = MT = MT = MG = MG |
| 1135 | CO-7824 | MA = M5C = MG = MA = MG = MA = M5C = M5C = MT = MG = MA = MG = MA = M5C = M5C = MT = MT = MG = MG = M5C |
| 1136 | CO-7825 | MT = MA = MG = MG = MT = MG = M5C = MT = MG = MG = M5C = MT = MT = M5C = MT = MT = M5C = M5C = M5C = M5C |
| 1137 | CO-7826 | MA = M5C = M5C = MA = MT = MT = M5C = MT = MT = MG = MA = M5C = M5C = M5C = MA = MG = M5C = MT = M5C = M5C |
| 1138 | CO-7827 | MG = M5C = MA = MG = MT = MG = MA = M5C = MG = M5C = M5C = M5C = M5C = MG = MT = MT = MA = MG = MA = MA |
| 1139 | CO-7828 | MG = MA = MG = MA = M5C = MA = MA = M5C = MA = MG = MA = MA = MG = MA = MA = M5C = M5C = MG = M5C = MT |
| 1140 | CO-7829 | MG = M5C = M5C = MA = MT = MG = MT = MG = MA = MG = M5C = MT = MT = MG = MA = MG = MG = MT = MT = M5C |
| 1141 | CO-7830 | MG = MG = MA = MG = MT = M5C = MG = MG = MA = M5C = MG = M5C = MA = MG = MG = MT = MA = MG = MG = MA |
| 1142 | CO-7831 | MG = MG = MG = MT = M5C = MT = MG = MT = MA = MG = MT = M5C = MT = MG = MA = MG = M5C = MG = M5C = MT |
| 1143 | CO-7832 | MT = MG = MG = MA = MA = MA = M5C = MT = MG = MA = MG = MG = MT = MA = MG = MG = M5C = MG = MG = MG |
| 1144 | CO-7833 | MA = MG = M5C = M5C = MA = MA = MT = MG = MG = MG = MA = MG = M5C = MG = MG = MG = MT = MA = MG = M5C |
| 1145 | CO-7834 | MG = MG = M5C = MT = MG = MG = M5C = M5C = M5C = M5C = MA = M5C = M5C = MT = M5C = MT = MA = MT = MA = MT |
| 1146 | CO-7835 | MA = MG = MG = MA = MG = MA = MG = MT = MG = MA = MT = MT = MT = MG = MA = MG = MT = MA = MG = MA |
| 1147 | CO-7836 | MG = M5C = MT = MG = MT = M5C = M5C = M5C = MG = MA = M5C = MG = MT = M5C = MA = M5C = MA = MT = MG = MA |
| 1148 | CO-7837 | MG = MG = MG = MT = MT = MA = MA = MG = MG = MA = MA = MG = MG = M5C = MG = MA = M5C = MG = MA = MG |
| 1149 | CO-7838 | MT = MA = MG = M5C = MA = MA = MA = M5C = MT = M5C = M5C = M5C = M5C = M5C = MA = MG = MG = M5C = MG = M5C |
| 1150 | CO-7839 | MG = M5C = M5C = M5C = M5C = MA = MG = MA = M5C = MA = M5C = MG = M5C = MG = M5C = MT = MA = MT = M5C = MA |
| 1151 | CO-7840 | MG = MG = M5C = MA = MG = MG = MA = MT = MA = MG = MG = MA = MT = MA = MG = MG = MA = MG = M5C = MG |
| 1152 | CO-7841 | MT = MG = M5C = M5C = MT = MA = MG = M5C = MA = MT = MG = MT = M5C = MA = MA = M5C = M5C = MG = MA = MG |
| 1153 | CO-7842 | M5C = MA = MT = M5C = M5C = MT = MT = M5C = MA = MA = M5C = MT = M5C = MA = M5C = MT = M5C = MT = MG = MG |
| 1154 | CO-7843 | MG = MG = M5C = MT = MG = MT = MT = MT = MA = MT = M5C = MT = MT = MT = MG = MT = M5C = M5C = MT = MG |
| 1155 | CO-7844 | MT = MG = MT = M5C = M5C = MT = MG = M5C = MT = MG = MA = MG = M5C = MA = M5C = M5C = MT = MT = MG = MA |
| 1156 | CO-7845 | MG = MA = MT = MT = M5C = MA = MG = M5C = M5C = MT = MG = MA = MG = MA = M5C = MT = MG = MT = M5C = MT |
| 1157 | CO-7846 | MG = M5C = MA = MA = M5C = MT = MG = MG = M5C = MG = M5C = MA = M5C = MA = MA = M5C = M5C = MT = MT = MG |
| 1158 | CO-7847 | MG = MA = M5C = MA = MA = MT = M5C = MT = MA = M5C = MT = MT = M5C = M5C = MT = M5C = MT = M5C = M5C = M5C |
| 1159 | CO-7848 | MA = MA = MT = M5C = MT = MT = M5C = M5C = M5C = MA = MG = MA = M5C = MT = M5C = MA = MG = M5C = MT = M5C |
| 1160 | CO-7849 | MG = M5C = MT = M5C = MT = MT = M5C = M5C = M5C = MA = MA = M5C = MA = M5C = M5C = MT = M5C = M5C = MT = M5C |
| 1161 | CO-7850 | MG = M5C = M5C = MT = MG = M5C = M5C = M5C = MT = MT = M5C = M5C = M5C = MA = MT = M5C = MT = MG = MG = MT |
| 1162 | CO-7851 | MG = MG = MA = MG = MA = M5C = MT = MA = MG = MG = MA = MA = MG = M5C = M5C = MA = M5C = MT = MT = M5C |
| 1163 | CO-7852 | MA = MT = MA = MT = M5C = MA = MA = MT = MT = M5C = M5C = MT = M5C = MG = MA = MA = MG = MG = M5C = MA |
| 1164 | CO-7853 | MG = MG = M5C = MT = MA = MA = MT = M5C = MT = MG = MT = MT = M5C = MT = MG = MT = MG = MG = MT = MA |
| 1165 | CO-7854 | M5C = MT = MG = MG = M5C = M5C = M5C = MA = MT = M5C = MT = M5C = M5C = M5C = MA = MT = M5C = MA = MT = M5C |
| 1166 | CO-7855 | MG = MT = MT = M5C = M5C = MT = M5C = M5C = MA = M5C = MG = MG = M5C = M5C = M5C = MA = MG = MT = MA = MT |
| 1167 | CO-7856 | MG = M5C = MT = MG = M5C = MA = MG = M5C = MA = MG = MT = M5C = MT = M5C = M5C = MA = MT = M5C = M5C = M5C |
| 1168 | CO-7857 | MA = MT = M5C = M5C = MT = M5C = MA = MG = M5C = MT = M5C = M5C = MA = MG = MT = MT = M5C = M5C = MT = MT |
| 1169 | CO-7858 | M5C = MG = MA = M5C = MT = MT = M5C = MT = MG = M5C = MT = MG = M5C = M5C = MT = M5C = MG = MA = MG = M5C |
| 1170 | CO-7859 | MT = M5C = MG = MG = MT = MT = MG = MG = M5C = MA = M5C = M5C = M5C = MT = MT = MT = M5C = M5C = M5C = MT |
| 1171 | CO-7860 | MT = M5C = M5C = MA = MG = MG = M5C = MT = MT = MA = MG = MA = MA = M5C = M5C = M5C = M5C = MT = MG = M5C |
| 1172 | CO-7861 | MT = MG = MT = M5C = MT = MT = MA = MT = M5C = M5C = MG = M5C = MT = MG = MT = M5C = MT = MG = MG = MG |
| 1173 | CO-7862 | MG = MG = M5C = MA = M5C = MA = MG = MA = M5C = MT = MA = MG = MT = MA = M5C = MT = MA = MG = MG = MT |
| 1174 | CO-7863 | M5C = MT = MA = MG = MT = M5C = MT = M5C = MA = MA = MG = MA = MT = MA = M5C = MA = M5C = MA = MG = MG |
| 1175 | CO-7864 | MG = MT = MG = MG = MT = MT = MG = MT = MA = MA = MT = MT = MA = MG = MT = MA = MG = MG = MT = MT |
| 1176 | CO-7865 | M5C = MA = M5C = MG = MG = M5C = MT = MT = MT = MG = MA = M5C = MG = MA = MT = MT = MA = MG = MA = M5C |
| 1177 | CO-7866 | M5C = M5C = MT = MA = MA = MA = MT = MG = MT = M5C = M5C = M5C = MT = MG = MG = M5C = M5C = MG = MG = M5C |
| 1178 | CO-7867 | MG = MT = M5C = M5C = M5C = MT = M5C = M5C = MA = M5C = M5C = M5C = MT = MG = MA = MG = MT = MT = MG = MT |
| 1179 | CO-7868 | MG = MT = MT = M5C = MT = MG = MT = MG = MT = MG = MT = M5C = MG = MT = MG = MT = MG = MA = MT = MG |
| 1180 | CO-7869 | MG = MA = MG = MT = M5C = MT = M5C = MA = MG = M5C = MA = M5C = MT = MA = MT = MT = MG = MA = M5C = M5C |
| 1181 | CO-7870 | M5C = MG = MT = MT = MA = MT = M5C = MG = MT = MG = MG = M5C = MA = M5C = M5C = MT = MT = MA = M5C = M5C |
| 1182 | CO-7871 | MG = MA = MT = MG = M5C = MT = MG = M5C = MA = MT = MA = MA = M5C = MT = M5C = MT = M5C = MT = MT = MA |
| 1183 | CO-7872 | MG = MG = MA = M5C = MA = MT = MA = MA = MG = MG = M5C = MT = MG = M5C = M5C = MT = MT = M5C = MT = MG |
| 1184 | CO-7873 | MG = MT = MT = MA = MG = MG = MG = MA = MG = MG = MG = MT = MG = MA = M5C = MT = MG = M5C = MT = MA |
| 1185 | CO-8046 | mG = MG = MA = M5C = MT = LT = MG = MG = LG = MA = MG = LT = MG = MG = LT = MG = MA = M5C = MT = MG |
| 1186 | CO-8170 | MG = MA = M5C = MT = MT = MG = MG = MG = MA = MG = MT = MG = MG = MT = MG = MA = M5C = MT = MG |
| 1187 | CO-8171 | MG = MA = M5C = MT = MT = MG = MG = MG = MA = MG = MT = MG = MG = MT = MG = MA = M5C = MT |
| 1188 | CO-8177 | MG = MA = M5C = MT = LT = MG = MG = MG = MA = LG = MT = MG = MG = MT = LG = MA = M5C = MT = MG |
| 691 | CO-8178 | MG = MA = M5C = MT = LT = MG = MG = MG = MA = LG = MT = MG = MG = MT = LG = MA = M5C = MT |
| 1189 | CO-8185 | MG = MG = MA = M5C = MT = LT = MG = MG = MG = MA = LG = MT = MG = MG = MT = LG = MA = M5C = MT = MG = MA = MA = M5C = M5C |
| 1190 | CO-8187 | MG = MG = MA = M5C = MT = MT = MG = MG = MG = MA = MG = MT = MG = MG = MT = MG = MA = M5C = MT = MG = MA = MA = M5C = M5C = MT |
| 1191 | CO-8188 | MG = MG = MA = M5C = MT = LT = MG = MG = MG = MA = LG = MT = MG = MG = MT = LG = MA = M5C = MT = MG = MA = MA = M5C = M5C = MT |
| 1192 | CO-8190 | MG = MG = MG = MA = M5C = MT = LT = MG = MG = MG = MA = LG = MT = MG = MG = MT = LG = MA = M5C = MT = MG = MA = MA = M5C = M5C = MT |
| 1193 | CO-8192 | MA = MG = MG = MG = MA = M5C = MT = MT = MG = MG = MG = MA = MG = MT = MG = MG = MT = MG = MA = M5C = MT = MG = MA = MA = M5C = M5C = MT |
| 1194 | CO-8193 | MA = MG = MG = MG = MA = M5C = MT = LT = MG = MG = MG = MA = LG = MT = MG = MG = MT = LG = MA = M5C = MT = MG = MA = MA = M5C = M5C = MT |
| 1195 | CO-8195 | MT = MA = MG = MG = MG = MA = M5C = MT = MT = MG = MG = MG = MA = MG = MT = MG = MG = MT = MG = MA = M5C = MT = MG = MA = MA = M5C = M5C = MT |
| 1196 | CO-8196 | MT = MA = MG = MG = MG = MA = M5C = MT = LT = MG = MG = MG = MA = LG = MT = MG = MG = MT = LG = MA = M5C = MT = MG = MA = MA = M5C = M5C = MT |
| 1197 | CO-8198 | MG = MT = MA = MG = MG = MG = MA = M5C = MT = MT = MG = MG = MG = MA = MG = MT = MG = MG = MT = MG = MA = M5C = MT = MG = MA = MA = M5C = M5C = MT |
| 1198 | CO-8199 | MG = MT = MA = MG = MG = MG = MA = M5C = MT = LT = MG = MG = MG = MA = LG = MT = MG = MG = MT = LG = MA = M5C = MT = MG = MA = MA = M5C = M5C = MT |
| 1199 | CO-8201 | MA = MG = MT = MA = MG = MG = MG = MA = M5C = MT = MT = MG = MG = MG = MA = MG = MT = MG = MG = MT = MG = MA = M5C = MT = MG = MA = MA = M5C = |
| | | M5C = MT |
| 1200 | CO-8202 | MA = MG = MT = MA = MG = MG = MG = MA = M5C = MT = LT = MG = MG = MG = MA = LG = MT = MG = MG = MT = LG = MA = M5C = MT = MG = MA = MA = M5C = |
| | | M5C = MT |
| 1201 | CO-8204 | MT = MA = MG = MT = MA = MG = MG = MG = MA = M5C = MT = MT = MG = MG = MG = MA = MG = MT = MG = MG = MT = MG = MA = M5C = MT = MG = MA = MA = M5C = |
| | | M5C = MT |
| 1202 | CO-8205 | MT = MA = MG = MT = MA = MG = MG = MG = MA = M5C = MT = LT = MG = MG = MG = MA = LG = MT = MG = MG = MT = LG = MA = M5C = MT = MG = MA = MA = M5C = |
| | | M5C = MT |
| 1203 | CO-8207 | MG = MG = MA = M5C = MT = MT = MG = MG = MG = MA = MG = MT = MG = MG = MT = MG = MA = M5C = MT = MG = MA = MA = M5C = M5C = MT = MG |
| 1204 | CO-8208 | MG = MG = MA = M5C = MT = LT = MG = MG = MG = MA = LG = MT = MG = MG = MT = LG = MA = M5C = MT = MG = MA = MA = M5C = M5C = MT = MG |
| 1205 | CO-8210 | MG = MG = MA = M5C = MT = MT = MG = MG = MG = MA = MG = MT = MG = MG = MT = MG = MA = M5C = MT = MG = MA = MA = M5C = M5C = MT = MG = MG |
| 1206 | CO-8211 | MG = MG = MA = M5C = MT = LT = MG = MG = MG = MA = LG = MT = MG = MG = MT = LG = MA = M5C = MT = MG = MA = MA = M5C = M5C = MT = MG = MG |
| 1207 | CO-8213 | MG = MG = MA = M5C = MT = MT = MG = MG = MG = MA = MG = MT = MG = MG = MT = MG = MA = M5C = MT = MG = MA = MA = M5C = M5C = MT = MG = MG = MT |
| 1208 | CO-8214 | MG = MG = MA = M5C = MT = LT = MG = MG = MG = MA = LG = MT = MG = MG = MT = LG = MA = M5C = MT = MG = MA = MA = M5C = M5C = MT = MG = MG = MT |
| 1209 | CO-8216 | MG = MG = MA = M5C = MT = MT = MG = MG = MG = MA = MG = MT = MG = MG = MT = MG = MA = M5C = MT = MG = MA = MA = M5C = M5C = MT = MG = MG = MT = M5C |
| 1210 | CO-8217 | MG = MG = MA = M5C = MT = LT = MG = MG = MG = MA = LG = MT = MG = MG = MT = LG = MA = M5C = MT = MG = MA = MA = M5C = M5C = MT = MG = MG = MT = M5C |
| 1211 | CO-8219 | MG = MG = MA = M5C = MT = MT = MG = MG = MG = MA = MG = MT = MG = MG = MT = MG = MA = M5C = MT = MG = MA = MA = M5C = M5C = MT = MG = MG = MT = |
| | | M5C = MT |
| 1212 | CO-8220 | MG = MG = MA = M5C = MT = LT = MG = MG = MG = MA = LG = MT = MG = MG = MT = LG = MA = M5C = MT = MG = MA = MA = M5C = M5C = MT = MG = MG = MT = |
| | | M5C = MT |
| 1213 | CO-8222 | MG = MG = MA = M5C = MT = MT = MG = MG = MG = MA = MG = MT = MG = MG = MT = MG = MA = M5C = MT = MG = MA = MA = M5C = M5C = MT = MG = MG = MT = |
| | | M5C = MT = M5C |
| 1214 | CO-8223 | MG = MG = MA = M5C = MT = LT = MG = MG = MG = MA = LG = MT = MG = MG = MT = LG = MA = M5C = MT = MG = MA = MA = M5C = M5C = MT = MG = MG = MT = |
| | | M5C = MT = M5C |
| 1215 | CO-8864 | MT = MA = MG = MG = MT = dG = d5C = MT = dG = dG = M5C = dT = dT = M5C = dT = MT = M5C = M5C = M5C = M5C |
| 1216 | CO-8865 | MT = MA = LG = MG = MT = dG = d5C = dT = dG = dG = d5C = dT = dT = d5C = dT = MT = M5C = L5C = M5C = M5C |
| 1217 | CO-8866 | LT = MA = MG = MG = MT = dG = d5C = dT = dG = dG = d5C = dT = dT = d5C = dT = MT = M5C = M5C = M5C = L5C |
| 1218 | CO-8867 | LT = MA = LG = MG = MT = dG = d5C = dT = dG = dG = d5C = dT = dT = d5C = dT = MT = M5C = L5C = M5C = L5C |
| 1219 | CO-8868 | MT = MA = MG − MG − MT = dG = d5C = dT = dG = dG = d5C = dT = dT = d5C = dT = MT − M5C − M5C = M5C = M5C |
| 1220 | CO-8869 | MT = MA − MG − MG − MT = dG = d5C = dT = dG = dG = d5C = dT = dT = d5C = dT = MT − M5C − M5C − M5C = M5C |
| 1221 | CO-8870 | MG = M5C = M5C = MA = MT = dG = dT = MG = dA = dG = M5C = dT = dT = MG = dA = MG = MG = MT = MT = M5C |
| 1222 | CO-8871 | MG = M5C = L5C = MA = MT = dG = dT = dG = dA = dG = d5C = dT = dT = dG = dA = MG = MG = LT = MT = M5C |
| 1223 | CO-8872 | LG = M5C = M5C = MA = MT = dG = dT = dG = dA = dG = d5C = dT = dT = dG = dA = MG = MG = MT = MT = L5C |
| 1224 | CO-8873 | LG = M5C = L5C = MA = MT = dG = dT = dG = dA = dG = d5C = dT = dT = dG = dA = MG = MG = LT = MT = L5C |
| 1225 | CO-8874 | MG = M5C = M5C − MA − MT = dG = dT = dG = dA = dG = d5C = dT = dT = dG = dA = MG − MG − MT = MT = M5C |
| 1226 | CO-8875 | MG = M5C − M5C − MA − MT = dG = dT = dG = dA = dG = d5C = dT = dT = dG = dA = MG − MG − MT − MT = M5C |
| 1227 | CO-8876 | MT = MA = MG = M5C = MA = dA = dA = M5C = dT = d5C = M5C = d5C = d5C = M5C = dA = MG = MG = M5C = MG = M5C |
| 1228 | CO-8877 | MT = MA = LG = M5C = MA = dA = dA = d5C = dT = d5C = d5C = d5C = d5C = d5C = dA = MG = MG = L5C = MG = M5C |
| 1229 | CO-8878 | LT = MA = MG = M5C = MA = dA = dA = d5C = dT = d5C = d5C = d5C = d5C = d5C = dA = MG = MG = M5C = MG = L5C |
| 1230 | CO-8879 | LT = MA = LG = M5C = MA = dA = dA = d5C = dT = d5C = d5C = d5C = d5C = d5C = dA = MG = MG = L5C = MG = L5C |
| 1231 | CO-8880 | MT = MA = MG − M5C − MA = dA = dA = d5C = dT = d5C = d5C = d5C = d5C = d5C = dA = MG − MG − M5C = MG = M5C |
| 1232 | CO-8881 | MT = MA − MG − M5C − MA = dA = dA = d5C = dT = d5C = d5C = d5C = d5C = d5C = dA = MG − MG − M5C − MG = M5C |
| 1233 | CO-8882 | M5C = MT = MG = MG = M5C = d5C = d5C = MA = dT = d5C = MT = d5C = d5C = M5C = dA = MT = M5C = MA = MT = M5C |
| 1234 | CO-8883 | M5C = MT = LG = MG = M5C = d5C = d5C = dA = dT = d5C = dT = d5C = d5C = d5C = dA = MT = M5C = LA = MT = M5C |
| 1235 | CO-8884 | L5C = MT = MG = MG = M5C = d5C = d5C = dA = dT = d5C = dT = d5C = d5C = d5C = dA = MT = M5C = MA = MT = L5C |
| 1236 | CO-8885 | L5C = MT = LG = MG = M5C = d5C = d5C = dA = dT = d5C = dT = d5C = d5C = d5C = dA = MT = M5C = LA = MT = L5C |
| 1237 | CO-8886 | M5C = MT = MG − MG − M5C = d5C = d5C = dA = dT = d5C = dT = d5C = d5C = d5C = dA = MT − M5C − MA = MT = M5C |
| 1238 | CO-8887 | M5C = MT − MG − MG − M5C = d5C = d5C = dA = dT = d5C = dT = d5C = d5C = d5C = dA = MT − M5C − MA − MT = M5C |
| 1239 | CO-8888 | MG = M5C = MT = MG = M5C = dA = dG = M5C = dA = dG = MT = d5C = dT = M5C = d5C = MA = MT = M5C = M5C = M5C |
| 1240 | CO-8889 | MG = M5C = LT = MG = M5C = dA = dG = d5C = dA = dG = dT = d5C = dT = d5C = d5C = MA = MT = L5C = M5C = M5C |
| 1241 | CO-8890 | LG = M5C = MT = MG = M5C = dA = dG = d5C = dA = dG = dT = d5C = dT = d5C = d5C = MA = MT = M5C = M5C = L5C |
| 1242 | CO-8891 | LG = M5C = LT = MG = M5C = dA = dG = d5C = dA = dG = dT = d5C = dT = d5C = d5C = MA = MT = L5C = M5C = L5C |
| 1243 | CO-8892 | MG = M5C = MT − MG − M5C = dA = dG = d5C = dA = dG = dT = d5C = dT = d5C = d5C = MA − MT − M5C = M5C = M5C |
| 1244 | CO-8893 | MG = M5C − MT − MG − M5C = dA = dG = d5C = dA = dG = dT = d5C = dT = d5C = d5C = MA − MT − M5C − M5C = M5C |
| 1245 | CO-8894 | MG = MT = MA = MG = MG = MT = dG = d5C = dT = dG = dG = d5C = dT = dT = d5C = dT = MT = M5C = M5C = M5C = M5C = MT |
| 1246 | CO-8895 | MG = MG = MT = MA = MG = MG = MT = dG = d5C = dT = dG = dG = d5C = dT = dT = d5C = dT = MT = M5C = M5C = M5C = M5C = MT = M5C |
| 1247 | CO-8896 | MG = MG = M5C = M5C = MA = MT = dG = dT = dG = dA = dG = d5C = dT = dT = dG = dA = MG = MG = MT = MT = M5C = M5C |
| 1248 | CO-8897 | MG = MG = MG = M5C = M5C = MA = MT = dG = dT = dG = dA = dG = d5C = dT = dT = dG = dA = MG = MG = MT = MT = M5C = M5C = M5C |
| 1249 | CO-8898 | M5C = MT = MA = MG = M5C = MA = dA = dA = d5C = dT = d5C = d5C = d5C = d5C = d5C = dA = MG = MG = M5C = MG = M5C = M5C |
| 1250 | CO-8899 | MT = M5C = MT = MA = MG = M5C = MA = dA = dA = d5C = dT = d5C = d5C = d5C = d5C = d5C = dA = MG = MG = M5C = MG = M5C = M5C = MT |
| 1251 | CO-8900 | M5C = M5C = MT = MG = MG = M5C = d5C = d5C = dA = dT = d5C = dT = d5C = d5C = d5C = dA = MT = M5C = MA = MT = M5C = M5C |
| 1252 | CO-8901 | MT = M5C = M5C = MT = MG = MG = M5C = d5C = d5C = dA = dT = d5C = dT = d5C = d5C = d5C = dA = MT = M5C = MA = MT = M5C = M5C = MA |
| 1253 | CO-8902 | MG = MG = M5C = MT = MG = M5C = dA = dG = d5C = dA = dG = dT = d5C = dT = d5C = d5C = MA = MT = M5C = M5C = M5C = M5C |
| 1254 | CO-8903 | MA = MG = MG = M5C = MT = MG = M5C = dA = dG = d5C = dA = dG = dT = d5C = dT = d5C = d5C = MA = MT = M5C = M5C = M5C = M5C = MT |
| 1255 | CO-8904 | M5C = M5C = M5C = M5C = MT = dT = dG = MG = d5C = dA = M5C = dT = d5C = MG = dG = MA = MG = MT = MT = MG |
| 1256 | CO-8905 | M5C = M5C = L5C = M5C = MT = LT = MG = MG = L5C = MA = M5C = LT = M5C = MG = LG = MA = MG = LT = MT = MG |
| 1257 | CO-8906 | M5C = M5C = M5C = M5C = LT = MT = MG = MG = L5C = MA = M5C = MT = L5C = MG = MG = MA = LG = MT = MT = MG |
| 1258 | CO-8907 | M5C = M5C = M5C = L5C = MT = MT = MG = LG = M5C = MA = M5C = LT = M5C = MG = MG = LA = MG = MT = MT = MG |
| 1259 | CO-8908 | M5C = L5C = M5C = M5C = LT = MT = MG = LG = M5C = MA = L5C = MT = M5C = LG = MG = MA = LG = MT = MT = LG |
| 1260 | CO-8909 | L5C = M5C = M5C = L5C = MT = MT = LG = MG = M5C = LA = M5C = MT = L5C = MG = MG = LA = MG = MT = LT = MG |
| 1261 | CO-8910 | MT = M5C = M5C = M5C = M5C = MT = dT = dG = dG = d5C = dA = d5C = dT = d5C = dG = dG = MA = MG = MT = MT = MG = MG |
| 1262 | CO-8911 | MT = M5C = M5C = M5C = M5C = MT = MT = MG = MG = M5C = MA = M5C = MT = M5C = MG = MG = MA = MG = MT = MT = MG = MG |
| 1263 | CO-8912 | M5C = MT = M5C = M5C = M5C = M5C = MT = dT = dG = dG = d5C = dA = d5C = dT = d5C = dG = dG = MA = MG = MT = MT = MG = MG = MG |
| 1264 | CO-8913 | M5C = MT = M5C = M5C = M5C = M5C = MT = MT = MG = MG = M5C = MA = M5C = MT = M5C = MG = MG = MA = MG = MT = MT = MG = MG = MG |
| 1265 | CO-10819 | [Palm] − MG = MG = MA = M5C = MT = LT = MG = MG = LG = MA = MG = LT = MG = MG = LT = MG = MA = M5C = MT = MG |
| 1266 | CO-10820 | [Palm] − MG = MG = MA = M5C = MT = LT = MG = MG = MG = MA = LG = MT = MG = MG = MT = LG = MA = M5C = MT = MG |
| 1267 | CO-10821 | [Palm] − MG = MG = MA = L5C = MT = MT = MG = MG = LG = MA = MG = MT = MG = LG = MT = MG = MA = M5C = LT = MG = MA = MA = M5C |
| 1268 | CO-10823 | [Palm] − MG = MG = MA − M5C − MT = MT = MG = MG = MG = MA = MG = MT = MG = MG = MT = MG − MA − M5C = MT = MG |
| 1269 | CO-10825 | MG = M5C = L5C = MA = MT = dG = dT = MG = dA = dG = M5C = dT = dT = MG = dA = MG = MG = LT = MT = M5C |
| 1270 | CO-10826 | LG = M5C = L5C = MA = MT = dG = dT = MG = dA = dG = M5C = dT = dT = MG = dA = MG = MG = LT = MT = L5C |
| 1271 | CO-10827 | MG = M5C = M5C − MA − MT = dG = dT = MG = dA = dG = M5C = dT = dT = MG = dA = MG − MG − MT = MT = M5C |
| 1272 | CO-10828 | MT = MA = LG = M5C = MA = dA = dA = M5C = dT = d5C = M5C = d5C = d5C = M5C = dA = MG = MG = L5C = MG = M5C |
| 1273 | CO-10829 | LT = MA = LG = M5C = MA = dA = dA = M5C = dT = d5C = M5C = d5C = d5C = M5C = dA = MG = MG = L5C = MG = L5C |
| 1274 | CO-10830 | MG = M5C = LT = MG = M5C = dA = dG = M5C = dA = dG = MT = d5C = dT = M5C = d5C = MA = MT = L5C = M5C = M5C |
| 1275 | CO-13669 | MG = d5C = d5C = dA = dT = dG = dT = dG = dA = dG = d5C = dT = dT = dG = dA = dG = dG = dT = dT = M5C |
| 1276 | CO-13670 | MG = M5C = d5C = dA = dT = dG = dT = dG = dA = dG = d5C = dT = dT = dG = dA = dG = dG = dT = MT = M5C |
| 1277 | CO-13671 | MG = M5C = M5C = dA = dT = dG = dT = dG = dA = dG = d5C = dT = dT = dG = dA = dG = dG = MT = MT = M5C |
| 1278 | CO-13672 | MG = M5C = M5C = MA = dT = dG = dT = dG = dA = dG = d5C = dT = dT = dG = dA = dG = MG = MT = MT = M5C |
| 1279 | CO-13673 | MG = M5C = M5C = MA = MT = MG = dT = dG = dA = dG = d5C = dT = dT = dG = MA = MG = MG = MT = MT = M5C |
| 1280 | CO-13674 | MG = M5C = M5C = MA = MT = MG = MT = dG = dA = dG = d5C = dT = dT = MG = MA = MG = MG = MT = MT = M5C |
| 1281 | CO-13675 | MG = M5C = M5C = MA = MT = MG = MT = MG = dA = dG = d5C = dT = MT = MG = MA = MG = MG = MT = MT = M5C |
| 1282 | CO-13676 | MG = M5C = M5C = MA = MT = MG = MT = MG = MA = dG = d5C = MT = MT = MG = MA = MG = MG = MT = MT = M5C |
| 1283 | CO-13677 | MG = d5C = d5C = dA = dT = dG = dT = dG = dA = dG = d5C = MT = MT = MG = MA = MG = MG = MT = MT = M5C |
| 1284 | CO-13678 | MG = M5C = d5C = dA = dT = dG = dT = dG = dA = dG = d5C = dT = MT = MG = MA = MG = MG = MT = MT = M5C |
| 1285 | CO-13679 | MG = M5C = M5C = dA = dT = dG = dT = dG = dA = dG = d5C = dT = dT = MG = MA = MG = MG = MT = MT = M5C |
| 1286 | CO-13680 | MG = M5C = M5C = MA = dT = dG = dT = dG = dA = dG = d5C = dT = dT = dG = MA = MG = MG = MT = MT = M5C |
| 1287 | CO-13681 | MG = M5C = M5C = MA = MT = MG = MT = dG = dA = dG = d5C = dT = dT = dG = dA = dG = dG = MT = MT = M5C |
| 1288 | CO-13682 | MG = M5C = M5C = MA = MT = MG = MT = MG = dA = dG = d5C = dT = dT = dG = dA = dG = dG = dT = MT = M5C |
| 1289 | CO-13683 | MG = M5C = M5C = MA = MT = MG = MT = MG = MA = dG = d5C = dT = dT = dG = dA = dG = dG = dT = dT = M5C |
| 1290 | CO-13684 | MG = M5C = M5C = MA = MT = MG = dT = dG = dA = dG = d5C = dT = dT = dG = dA = dG = MG = MT = MT = M5C |
| 1291 | CO-13685 | dG = d5C = d5C = dA = dT = dG = dT = dG = dA = dG = d5C = dT = dT = dG = dA = dG = dG = dT = dT = d5C |
| 1292 | CO-13686 | MG = d5C = M5C = dA = MT = dG = MT = dG = MA = dG = M5C = dT = MT = dG = MA = dG = MG = dT = MT = d5C |
| 1293 | CO-13687 | MG = M5C = M5C = MA = MT = MG = MT = dG = dA = dG = d5C = dT = MT = MG = MA = MG = MG = MT = MT = M5C |
| 1294 | CO-13688 | MG = M5C = M5C = MA = MT = MG = MT = MG = dA = dG = d5C = dT = dT = MG = MA = MG = MG = MT = MT = M5C |
| 1295 | CO-13689 | dG = d5C = d5C = dA = dT = dG = dT = dG = dA = dG = M5C = MT = MT = MG = MA = MG = MG = MT = MT = M5C |
| 1296 | CO-13690 | MG = M5C = M5C = MA = MT = MG = MT = MG = MA = MG = d5C = dT = dT = dG = dA = dG = dG = dT = dT = d5C |
| 1297 | CO-14208 | M5C = MT = M5C = M5C = M5C = dA = dG = d5C = d5C = dA = d5C = dT = dT = dT = dT = MT = M5C = M5C = MT = MG |
| 1298 | CO-14209 | M5C = MT = M5C = MT = M5C = d5C = d5C = dA = dG = d5C = d5C = dA = d5C = dT = dT = MT = MT = MT = M5C = M5C |
| 1299 | CO-14210 | M5C = MG = M5C = M5C = MT = d5C = dT = d5C = d5C = d5C = dA = dG = d5C = d5C = dA = M5C = MT = MT = MT = MT |
| 1300 | CO-14211 | MT = MA = MG = M5C = MT = dT = d5C = d5C = dG = d5C = d5C = dT = d5C = dT = d5C = M5C = M5C = MA = MG = M5C |
| 1301 | CO-14212 | MG = M5C = MT = MA = MG = d5C = dT = dT = d5C = d5C = dG = d5C = d5C = dT = d5C = MT = M5C = M5C = M5C = MA |
| 1302 | CO-14213 | MA = MG = M5C = MT = MA = dG = d5C = dT = dT = d5C = d5C = dG = d5C = d5C = dT = M5C = MT = M5C = M5C = M5C |
| 1303 | CO-14214 | M5C = MG = MA = MG = M5C = dT = dA = dG = d5C = dT = dT = d5C = d5C = dG = d5C = M5C = MT = M5C = MT = M5C |
| 1304 | CO-14215 | MG = MA = M5C = MG = MA = dG = d5C = dT = dA = dG = d5C = dT = dT = d5C = d5C = MG = M5C = M5C = MT = M5C |
| 1305 | CO-14216 | MG = MG = MA = M5C = MG = dA = dG = d5C = dT = dA = dG = d5C = dT = dT = d5C = M5C = MG = M5C = M5C = MT |
| 1306 | CO-14217 | MG = MT = MG = MG = MG = dA = d5C = dG = dA = dG = d5C = dT = dA = dG = d5C = MT = MT = M5C = M5C = MG |
| 1307 | CO-14218 | MG = MG = MG = MT = MG = dG = dG = dA = d5C = dG = dA = dG = d5C = dT = dA = MG = M5C = MT = MT = M5C |
| 1308 | CO-14219 | MG = M5C = MG = MG = MG = dT = dG = dG = dG = dA = d5C = dG = dA = dG = d5C = MT = MA = MG = M5C = MT |
| 1309 | CO-14220 | MG = MT = MT = MG = M5C = dG = dG = dG = dT = dG = dG = dG = dA = d5C = dG = MA = MG = M5C = MT = MA |
| 1310 | CO-14221 | MT = MT = MG = MT = MT = dG = d5C = dG = dG = dG = dT = dG = dG = dG = dA = M5C = MG = MA = MG = M5C |
| 1311 | CO-14222 | M5C = MT = M5C = MT = MT = dG = dT = dT = dG = d5C = dG = dG = dG = dT = dG = MG = MG = MA = M5C = MG |
| 1312 | CO-14223 | MT = M5C = M5C = MT = M5C = dT = dT = dG = dT = dT = dG = d5C = dG = dG = dG = MT = MG = MG = MG = MA |
| 1313 | CO-14224 | MA = M5C = MT = MT = M5C = d5C = dT = d5C = dT = dT = dG = dT = dT = dG = d5C = MG = MG = MG = MT = MG |
| 1314 | CO-14225 | M5C = MT = MT = MA = M5C = dT = dT = d5C = d5C = dT = d5C = dT = dT = dG = dT = MT = MG = M5C = MG = MG |
| 1315 | CO-14226 | MG = MG = M5C = MG = MA = dG = dA = dG = dG = dA = dA = dG = d5C = dA = dG = MG = MG = MA = MG = MG |
| 1316 | CO-14227 | M5C = M5C = MT = MA = MG = dA = dA = dA = dT = dG = dG = dG = dG = dT = dG = MT = MG = MG = MG = MG |
| 1317 | CO-14228 | MA = M5C = MA = MT = MG = dA = dT = d5C = d5C = d5C = dT = dA = dG = dA = dA = MA = MT = MG = MG = MG |
| 1318 | CO-14229 | M5C = MA = MA = MT = M5C = dA = d5C = dA = dT = dG = dA = dT = d5C = d5C = d5C = MT = MA = MG = MA = MA |
| 1319 | CO-14230 | MT = M5C = MT = M5C = M5C = dA = dA = dT = d5C = dA = d5C = dA = dT = dG = dA = MT = M5C = M5C = M5C = MT |
| 1320 | CO-14231 | MA = MT = MT = M5C = MT = d5C = d5C = dA = dA = dT = d5C = dA = d5C = dA = dT = MG = MA = MT = M5C = M5C |
| 1321 | CO-14232 | MT = MG = MA = MT = MT = d5C = dT = d5C = d5C = dA = dA = dT = d5C = dA = d5C = MA = MT = MG = MA = MT |
| 1322 | CO-14233 | M5C = MA = MT = MG = MA = dT = dT = d5C = dT = d5C = d5C = dA = dA = dT = d5C = MA = M5C = MA = MT = MG |
| 1323 | CO-14234 | M5C = MA = M5C = MA = MT = dG = dA = dT = dT = d5C = dT = d5C = d5C = dA = dA = MT = M5C = MA = M5C = MA |
| 1324 | CO-14235 | M5C = MT = M5C = M5C = M5C = MA = MG = M5C = M5C = MA = M5C = MT = MT = MT = MT = MT = M5C = M5C = MT = MG |
| 1325 | CO-14236 | M5C = MT = M5C = MT = M5C = M5C = M5C = MA = MG = M5C = M5C = MA = M5C = MT = MT = MT = MT = MT = M5C = M5C |
| 1326 | CO-14237 | M5C = MG = M5C = M5C = MT = M5C = MT = M5C = M5C = M5C = MA = MG = M5C = M5C = MA = M5C = MT = MT = MT = MT |
| 1327 | CO-14238 | MT = MA = MG = M5C = MT = MT = M5C = M5C = MG = M5C = M5C = MT = M5C = MT = M5C = M5C = M5C = MA = MG = M5C |
| 1328 | CO-14239 | MG = M5C = MT = MA = MG = M5C = MT = MT = M5C = M5C = MG = M5C = M5C = MT = M5C = MT = M5C = M5C = M5C = MA |
| 1329 | CO-14240 | MA = MG = M5C = MT = MA = MG = M5C = MT = MT = M5C = M5C = MG = M5C = M5C = MT = M5C = MT = M5C = M5C = M5C |
| 1330 | CO-14241 | M5C = MG = MA = MG = M5C = MT = MA = MG = M5C = MT = MT = M5C = M5C = MG = M5C = M5C = MT = M5C = MT = M5C |
| 1331 | CO-14242 | MG = MA = M5C = MG = MA = MG = M5C = MT = MA = MG = M5C = MT = MT = M5C = M5C = MG = M5C = M5C = MT = M5C |
| 1332 | CO-14243 | MG = MG = MA = M5C = MG = MA = MG = M5C = MT = MA = MG = M5C = MT = MT = M5C = M5C = MG = M5C = M5C = MT |
| 1333 | CO-14244 | MG = MT = MG = MG = MG = MA = M5C = MG = MA = MG = M5C = MT = MA = MG = M5C = MT = MT = M5C = M5C = MG |
| 1334 | CO-14245 | MG = MG = MG = MT = MG = MG = MG = MA = M5C = MG = MA = MG = M5C = MT = MA = MG = M5C = MT = MT = M5C |
| 1335 | CO-14246 | MG = M5C = MG = MG = MG = MT = MG = MG = MG = MA = M5C = MG = MA = MG = M5C = MT = MA = MG = M5C = MT |
| 1336 | CO-14247 | MG = MT = MT = MG = M5C = MG = MG = MG = MT = MG = MG = MG = MA = M5C = MG = MA = MG = M5C = MT = MA |
| 1337 | CO-14248 | MT = MT = MG = MT = MT = MG = M5C = MG = MG = MG = MT = MG = MG = MG = MA = M5C = MG = MA = MG = M5C |
| 1338 | CO-14249 | M5C = MT = M5C = MT = MT = MG = MT = MT = MG = M5C = MG = MG = MG = MT = MG = MG = MG = MA = M5C = MG |
| 1339 | CO-14250 | MT = M5C = M5C = MT = M5C = MT = MT = MG = MT = MT = MG = M5C = MG = MG = MG = MT = MG = MG = MG = MA |
| 1340 | CO-14251 | MA = M5C = MT = MT = M5C = M5C = MT = M5C = MT = MT = MG = MT = MT = MG = M5C = MG = MG = MG = MT = MG |
| 1341 | CO-14252 | M5C = MT = MT = MA = M5C = MT = MT = M5C = M5C = MT = M5C = MT = MT = MG = MT = MT = MG = M5C = MG = MG |
| 1342 | CO-14253 | MG = MG = M5C = MG = MA = MG = MA = MG = MG = MA = MA = MG = M5C = MA = MG = MG = MG = MA = MG = MG |
| 1343 | CO-14254 | M5C = M5C = MT = MA = MG = MA = MA = MA = MT = MG = MG = MG = MG = MT = MG = MT = MG = MG = MG = MG |
| 1344 | CO-14255 | MA = M5C = MA = MT = MG = MA = MT = M5C = M5C = M5C = MT = MA = MG = MA = MA = MA = MT = MG = MG = MG |
| 1345 | CO-14256 | M5C = MA = MA = MT = M5C = MA = M5C = MA = MT = MG = MA = MT = M5C = M5C = M5C = MT = MA = MG = MA = MA |
| 1346 | CO-14257 | MT = M5C = MT = M5C = M5C = MA = MA = MT = M5C = MA = M5C = MA = MT = MG = MA = MT = M5C = M5C = M5C = MT |
| 1347 | CO-14258 | MA = MT = MT = M5C = MT = M5C = M5C = MA = MA = MT = M5C = MA = M5C = MA = MT = MG = MA = MT = M5C = M5C |
| 1348 | CO-14259 | MT = MG = MA = MT = MT = M5C = MT = M5C = M5C = MA = MA = MT = M5C = MA = M5C = MA = MT = MG = MA = MT |
| 1349 | CO-14260 | M5C = MA = MT = MG = MA = MT = MT = M5C = MT = M5C = M5C = MA = MA = MT = M5C = MA = M5C = MA = MT = MG |
| 1350 | CO-14261 | M5C = MA = M5C = MA = MT = MG = MA = MT = MT = M5C = MT = M5C = M5C = MA = MA = MT = M5C = MA = M5C = MA |
| 1351 | CO-14677 | BioTEG = .[C18] = MG = MG = MA = M5C = MT = dT = dG = dG = dG = dA = dG = dT = dG = dG = dT = MG = MA = M5C = MT = MG |
| 1352 | CO-14678 | BioTEG = .[C18] = MG = MG = MA = M5C = MT = LT = MG = MG = LG = MA = MG = LT = MG = MG = LT = MG = MA = M5C = MT = MG |
| 1353 | CO-14679 | BioTEG = [C18] = LG = LG = LA = L5C = LT = dT = dG = dG = dG = dA = dG = dT = dG = dG = dT = LG = LA = L5C = LT = LG |
| 1354 | CO-14680 | BioTEG = .[C18] = MG = MG = MA = M5C = MT = MT = MG = MG = MG = MA = MG = MT = MG = MG = MT = MG = MA = M5C = MT = MG |
| 1355 | CO-14681 | BioTEG = .[C18] = MG = MG = MA = M5C = MT = MT = MG = MG = MG = MA − MG = MT = MG = MG = MT = MG = MA = M5C = MT = MG |
| 1356 | CO-14682 | BioTEG = .[C18] = MG = MG = MA = M5C = MT − MT = MG = MG = MG = MA − MG = MT = MG = MG = MT − MG = MA = M5C = MT = MG |
| 1357 | CO-14683 | BioTEG = .[C18] = MG = MG − MA = M5C − MT = MT − MG = MG − MG = MA − MG = MT − MG = MG − MT = MG − MA = M5C − MT = MG |
| 1358 | CO-14684 | BioTEG = .[C18] = MG − MG − MA − M5C − MT = MT − MG − MG − MG − MA = MG − MT − MG − MG − MT = MG − MA − M5C − MT − MG |
| 1359 | CO-14685 | BioTEG = .[C18] = MG − MG − MA − M5C − MT − MT − MG − MG − MG − MA = MG − MT − MG − MG − MT − MG − MA − M5C − MT − MG |
| 1360 | CO-14686 | BioTEG = .[C18] = MG = MG = MA = M5C = MT = dT = dG = dG = dG = dA − dG = dT = dG = dG = dT = MG = MA = M5C = MT = MG |
| 1361 | CO-14687 | BioTEG = .[C18] = MG = MG = MA = M5C = MT − dT = dG = dG = dG = dA − dG = dT = dG = dG = dT − MG = MA = M5C = MT = MG |
| 1362 | CO-14688 | BioTEG = .[C18] = MG = MG − MA = M5C − MT = dT − dG = dG − dG = dA − dG = dT − dG = dG − dT = MG − MA = M5C − MT = MG |
| 1363 | CO-14689 | BioTEG = .[C18] = MG − MG − MA − M5C − MT = dT − dG − dG − dG − dA = dG − dT − dG − dG − dT = MG − MA − M5C − MT − MG |
| 1364 | CO-14690 | BioTEG = .[C18] = MG − MG − MA − M5C − MT − dT − dG − dG − dG − dA = dG − dT − dG − dG − dT − MG − MA − M5C − MT − MG |
| 1365 | CO-14691 | BioTEG = .[C18] = dG = dG = dA = d5C = dT = dT = dG = dG = dG = dA = dG = dT = dG = dG = dT = dG = dA = d5C = dT = dG |
| 1366 | CO-14692 | BioTEG = .[C18] = dG − dG − dA − d5C − dT − dT − dG − dG − dG − dA − dG − dT − dG − dG − dT − dG − dA − d5C − dT − dG |
| 1367 | CO-14712 | BioTEG = .[C18] = MG = MG = MA = M5C = MT = LT = MG = MG = LG = MA = MG = LT = MG = MG = LT = MG = MA = M5C = MT |
| 1368 | CO-14713 | BioTEG = .[C18] = MG = MG = MA = M5C = MT = LT = MG = MG = LG = MA = MG = LT = MG = MG = LT = MG = MA = M5C |
| 4743 | CO-7761 | BioTEG − dT − dT − dT − dT − dT − dT − dT − dT − dT − dT − MG = MG = MA = M5C = MT = LT = MG = MG = LG = MA = MG = LT = MG = MG = LT = MG = MA = M5C = MT = MG |
| 4744 | CO-7763 | BioTEG − dT − dT − dT − dT − dT − dT − dT − dT − dT − dT − MG − MG − MA − M5C − MT − LT − MG − MG − LG − MA − MG − LT − MG − MG − LT − MG − MA − M5C − MT − MG |
| 4745 | CO-15889 | MG = MG = MG = MT = MG = d5C = d5C = dA = d5C = d5C = dT = dA = dG = dT = dG = MG = MA = MA = MG = MA |
| 4746 | CO-15890 | MT = MG = MG = MG = MG = dG = dG = dT = dG = d5C = d5C = dA = d5C = d5C = dT = MA = MG = MT = MG = MG |
| 4747 | CO-15891 | MT = M5C = MG = MG = MA = dG = dT = dT = dG = dG = dG = dG = dG = dG = dT = MG = M5C = M5C = MA = M5C |
| 4748 | CO-15892 | MG = MG = M5C = MA = M5C = dT = d5C = dG = dG = dA = dG = dT = dT = dG = dG = MG = MG = MG = MG = MT |
| 4749 | CO-15893 | MT = M5C = M5C = MT = M5C = dT = d5C = d5C = d5C = d5C = dT = dT = dG = dG = d5C = MA = M5C = MT = M5C = MG |
| 4750 | CO-15894 | MG = MA = MA = MT = MT = dT = d5C = d5C = dT = d5C = dT = d5C = d5C = d5C = d5C = MT = MT = MG = MG = M5C |
| 4751 | CO-15895 | MT = MT = MT = MT = MG = dG = dG = dA = dA = dT = dT = dT = d5C = d5C = dT = M5C = MT = M5C = M5C = M5C |
| 4752 | CO-15896 | MG = M5C = MT = M5C = M5C = d5C = d5C = dT = dT = dT = dT = dG = dG = dG = dA = MA = MT = MT = MT = M5C |
| 4753 | CO-15897 | MT = MG = MA = MG = MA = d5C = d5C = dT = dT = dG = dG = d5C = dT = dT = d5C = MT = M5C = MG = MA = MA |
| 4754 | CO-15898 | MT = MG = MG = MG = MA = dA = d5C = dG = dA = dG = dA = d5C = d5C = dT = dG = MA = MG = MA = M5C = M5C |
| 4755 | CO-15899 | M5C = MG = MA = MG = MG = dG = d5C = d5C = dT = dG = dG = dG = dA = dA = d5C = MG = MA = MG = MA = M5C |
| 4756 | CO-15900 | M5C = MT = M5C = MT = M5C = d5C = dT = dG = dG = dT = dG = dG = dT = dG = dG = MT = MG = MG = MG = MT |
| 4757 | CO-15901 | MT = M5C = M5C = M5C = M5C = dT = d5C = dT = d5C = d5C = dT = dG = dG = dT = dG = MG = MT = MG = MG = MT |
| 4758 | CO-15902 | MT = MT = M5C = MT = MT = d5C = d5C = d5C = d5C = dT = d5C = dT = d5C = d5C = dT = MG = MG = MT = MG = MG |
| 4759 | CO-15903 | MG = M5C = MT = MG = MG = d5C = dT = dT = d5C = dT = dT = d5C = d5C = d5C = d5C = MT = M5C = MT = M5C = M5C |
| 4760 | CO-15904 | M5C = MT = MG = MT = M5C = dG = dG = dT = dA = dG = dG = dT = dG = d5C = dT = MG = MG = M5C = MT = MT |
| 4761 | CO-15905 | MA = MG = M5C = MT = M5C = d5C = dA = d5C = d5C = d5C = d5C = dT = dG = dT = d5C = MG = MG = MT = MA = MG |
| 4762 | CO-15906 | MA = M5C = M5C = M5C = MA = dG = d5C = dT = d5C = d5C = dA = d5C = d5C = d5C = d5C = MT = MG = MT = M5C = MG |
| 4763 | CO-15907 | M5C = MT = MT = MG = MA = d5C = d5C = d5C = dA = dG = d5C = dT = d5C = d5C = dA = M5C = M5C = M5C = M5C = MT |
| 4764 | CO-15908 | MG = MG = MA = MG = MT = d5C = dT = d5C = dA = dG = d5C = d5C = dG = dG = dA = MG = MA = M5C = MA = MA |
| 4765 | CO-15909 | MG = MA = MG = MG = MT = dT = d5C = d5C = d5C = d5C = dT = dG = dG = dA = dG = MT = M5C = MT = M5C = MA |
| 4766 | CO-15910 | MG = M5C = MT = MT = MG = dA = dG = dG = dT = dT = d5C = d5C = d5C = d5C = dT = MG = MG = MA = MG = MT |
| 4767 | CO-15911 | MG = MT = MG = MA = MG = d5C = dT = dT = dG = dA = dG = dG = dT = dT = d5C = M5C = M5C = M5C = MT = MG |
| 4768 | CO-15912 | M5C = MG = M5C = M5C = MA = dG = dG = dG = d5C = d5C = dA = dT = dG = dT = dG = MA = MG = M5C = MT = MT |
| 4769 | CO-15913 | MG = MG = M5C = M5C = M5C = dG = d5C = d5C = dA = dG = dG = dG = d5C = d5C = dA = MT = MG = MT = MG = MA |
| 4770 | CO-15914 | M5C = MA = MG = MG = MG = dG = d5C = d5C = d5C = dG = d5C = d5C = dA = dG = dG = MG = M5C = M5C = MA = MT |
| 4771 | CO-15915 | MT = MG = M5C = M5C = M5C = dA = dG = dG = dG = dG = d5C = d5C = d5C = dG = d5C = M5C = MA = MG = MG = MG |
| 4772 | CO-15916 | MT = MG = M5C = MT = M5C = d5C = dT = dG = d5C = d5C = d5C = dA = dG = dG = dG = MG = M5C = M5C = M5C = MG |
| 4773 | CO-15917 | MG = MG = MA = MT = MG = dG = dG = dT = dT = dA = dA = dG = dG = dA = dA = MG = MG = M5C = MG = MA |
| 4774 | CO-15918 | MA = MG = MG = M5C = MG = d5C = d5C = dT = dG = d5C = dA = dG = dG = dA = dT = MG = MG = MG = MT = MT |
| 4775 | CO-15919 | M5C = M5C = M5C = M5C = MA = dG = dG = d5C = dG = d5C = d5C = dT = dG = d5C = dA = MG = MG = MA = MT = MG |
| 4776 | CO-15920 | MA = MA = M5C = MT = M5C = d5C = d5C = d5C = d5C = dA = dG = dG = d5C = dG = d5C = M5C = MT = MG = M5C = MA |
| 4777 | CO-15921 | MG = M5C = MG = M5C = MT = dA = dT = d5C = dA = dT = d5C = dT = d5C = dT = dA = MG = M5C = MA = MA = MA |
| 4778 | CO-15922 | MT = M5C = MT = MG = M5C = d5C = dT = dG = dG = d5C = d5C = d5C = dA = dG = dG = M5C = M5C = M5C = MT = MT |
| 4779 | CO-15923 | MA = MT = M5C = M5C = MA = dT = d5C = dT = d5C = dT = dG = d5C = d5C = dT = dG = MG = M5C = M5C = M5C = MA |
| 4780 | CO-15924 | MT = M5C = MT = M5C = M5C = d5C = dA = dT = d5C = dA = dT = d5C = d5C = dA = dT = M5C = MT = M5C = MT = MG |
| 4781 | CO-15925 | M5C = M5C = M5C = MA = MT = d5C = dT = d5C = d5C = d5C = dA = dT = d5C = dA = dT = M5C = M5C = MA = MT = M5C |
| 4782 | CO-15926 | MT = M5C = MT = M5C = MT = d5C = d5C = dT = dG = dG = d5C = d5C = d5C = dA = dT = M5C = MT = M5C = M5C = M5C |
| 4783 | CO-15927 | MG = MG = MG = M5C = M5C = dT = d5C = dT = d5C = d5C = dT = d5C = dT = d5C = dT = M5C = M5C = MT = MG = MG |
| 4784 | CO-15928 | MT = M5C = M5C = M5C = MT = dG = dG = dG = d5C = d5C = dT = d5C = dT = d5C = d5C = MT = M5C = MT = M5C = MT |
| 4785 | CO-15929 | MG = M5C = MT = MT = MT = d5C = d5C = d5C = dT = dG = dG = dG = d5C = d5C = dT = M5C = MT = M5C = M5C = MT |
| 4786 | CO-15930 | MG = MT = MG = M5C = MA = dG = dA = d5C = dA = d5C = dT = dG = d5C = d5C = dG = MT = MT = M5C = M5C = MT |
| 4787 | CO-15931 | M5C = M5C = M5C = M5C = MT = dG = dT = dG = d5C = dA = dG = dA = d5C = dA = d5C = MT = MG = M5C = M5C = MG |
| 4788 | CO-15932 | M5C = M5C = MA = MT = M5C = d5C = d5C = d5C = dT = dG = dT = dG = d5C = dA = dG = MA = M5C = MA = M5C = MT |
| 4789 | CO-15933 | MA = MG = MT = M5C = MT = d5C = d5C = dA = dT = d5C = d5C = d5C = d5C = dT = dG = MT = MG = M5C = MA = MG |
| 4790 | CO-15934 | M5C = MT = MT = MG = M5C = dT = d5C = dA = dG = dG = d5C = dT = dG = d5C = dA = MG = M5C = MA = MG = MT |
| 4791 | CO-15935 | MG = MT = MT = M5C = M5C = dT = dT = dG = d5C = dT = d5C = dA = dG = dG = d5C = MT = MG = M5C = MA = MG |
| 4792 | CO-15936 | MT = M5C = MA = MG = M5C = dT = d5C = d5C = dA = dG = dT = dT = d5C = d5C = dT = MT = MG = M5C = MT = M5C |
| 4793 | CO-15937 | MG = MG = MG = MT = MG = L5C = M5C = MA = L5C = M5C = MT = LA = MG = MT = LG = MG = MA = MA = MG = MA |
| 4794 | CO-15938 | MT = MG = MG = MG = MG = LG = MG = MT = LG = M5C = M5C = LA = M5C = M5C = LT = MA = MG = MT = MG = MG |
| 4795 | CO-15939 | MT = M5C = MG = MG = MA = LG = MT = MT = LG = MG = MG = LG = MG = MG = LT = MG = M5C = M5C = MA = M5C |
| 4796 | CO-15940 | MG = MG = M5C = MA = M5C = LT = M5C = MG = LG = MA = MG = LT = MT = MG = LG = MG = MG = MG = MG = MT |
| 4797 | CO-15941 | MT = M5C = M5C = MT = M5C = LT = M5C = M5C = L5C = M5C = MT = LT = MG = MG = L5C = MA = M5C = MT = M5C = MG |
| 4798 | CO-15942 | MG = MA = MA = MT = MT = LT = M5C = M5C = LT = M5C = MT = L5C = M5C = M5C = L5C = MT = MT = MG = MG = M5C |
| 4799 | CO-15943 | MT = MT = MT = MT = MG = LG = MG = MA = LA = MT = MT = LT = M5C = M5C = LT = M5C = MT = M5C = M5C = M5C |
| 4800 | CO-15944 | MG = M5C = MT = M5C = M5C = L5C = M5C = MT = LT = MT = MT = LG = MG = MG = LA = MA = MT = MT = MT = M5C |
| 4801 | CO-15945 | MT = MG = MA = MG = MA = L5C = M5C = MT = LT = MG = MG = L5C = MT = MT = L5C = MT = M5C = MG = MA = MA |
| 4802 | CO-15946 | MT = MG = MG = MG = MA = LA = M5C = MG = LA = MG = MA = L5C = M5C = MT = LG = MA = MG = MA = M5C = M5C |
| 4803 | CO-15947 | M5C = MG = MA = MG = MG = LG = M5C = M5C = LT = MG = MG = LG = MA = MA = L5C = MG = MA = MG = MA = M5C |
| 4804 | CO-15948 | M5C = MT = M5C = MT = M5C = L5C = MT = MG = LG = MT = MG = LG = MT = MG = LG = MT = MG = MG = MG = MT |
| 4805 | CO-15949 | MT = M5C = M5C = M5C = M5C = LT = M5C = MT = L5C = M5C = MT = LG = MG = MT = LG = MG = MT = MG = MG = MT |
| 4806 | CO-15950 | MT = MT = M5C = MT = MT = L5C = M5C = M5C = L5C = MT = M5C = LT = M5C = M5C = LT = MG = MG = MT = MG = MG |
| 4807 | CO-15951 | MG = M5C = MT = MG = MG = L5C = MT = MT = L5C = MT = MT = L5C = M5C = M5C = L5C = MT = M5C = MT = M5C = M5C |
| 4808 | CO-15952 | M5C = MT = MG = MT = M5C = LG = MG = MT = LA = MG = MG = LT = MG = M5C = LT = MG = MG = M5C = MT = MT |
| 4809 | CO-15953 | MA = MG = M5C = MT = M5C = L5C = MA = M5C = L5C = M5C = M5C = LT = MG = MT = L5C = MG = MG = MT = MA = MG |
| 4810 | CO-15954 | MA = M5C = M5C = M5C = MA = LG = M5C = MT = L5C = M5C = MA = L5C = M5C = M5C = L5C = MT = MG = MT = M5C = MG |
| 4811 | CO-15955 | M5C = MT = MT = MG = MA = L5C = M5C = M5C = LA = MG = M5C = LT = M5C = M5C = LA = M5C = M5C = M5C = M5C = MT |
| 4812 | CO-15956 | MG = MG = MA = MG = MT = L5C = MT = M5C = LA = MG = M5C = L5C = MG = MG = LA = MG = MA = M5C = MA = MA |
| 4813 | CO-15957 | MG = MA = MG = MG = MT = LT = M5C = M5C = L5C = M5C = MT = LG = MG = MA = LG = MT = M5C = MT = M5C = MA |
| 4814 | CO-15958 | MG = M5C = MT = MT = MG = LA = MG = MG = LT = MT = M5C = L5C = M5C = M5C = LT = MG = MG = MA = MG = MT |
| 4815 | CO-15959 | MG = MT = MG = MA = MG = L5C = MT = MT = LG = MA = MG = LG = MT = MT = L5C = M5C = M5C = M5C = MT = MG |
| 4816 | CO-15960 | M5C = MG = M5C = M5C = MA = LG = MG = MG = L5C = M5C = MA = LT = MG = MT = LG = MA = MG = M5C = MT = MT |
| 4817 | CO-15961 | MG = MG = M5C = M5C = M5C = LG = M5C = M5C = LA = MG = MG = LG = M5C = M5C = LA = MT = MG = MT = MG = MA |
| 4818 | CO-15962 | M5C = MA = MG = MG = MG = LG = M5C = M5C = L5C = MG = M5C = L5C = MA = MG = LG = MG = M5C = M5C = MA = MT |
| 4819 | CO-15963 | MT = MG = M5C = M5C = M5C = LA = MG = MG = LG = MG = M5C = L5C = M5C = MG = L5C = M5C = MA = MG = MG = MG |
| 4820 | CO-15964 | MT = MG = M5C = MT = M5C = L5C = MT = MG = L5C = M5C = M5C = LA = MG = MG = LG = MG = M5C = M5C = M5C = MG |
| 4821 | CO-15965 | MG = MG = MA = MT = MG = LG = MG = MT = LT = MA = MA = LG = MG = MA = LA = MG = MG = M5C = MG = MA |
| 4822 | CO-15966 | MA = MG = MG = M5C = MG = L5C = M5C = MT = LG = M5C = MA = LG = MG = MA = LT = MG = MG = MG = MT = MT |
| 4823 | CO-15967 | M5C = M5C = M5C = M5C = MA = LG = MG = M5C = LG = M5C = M5C = LT = MG = M5C = LA = MG = MG = MA = MT = MG |
| 4824 | CO-15968 | MA = MA = M5C = MT = M5C = L5C = M5C = M5C = L5C = MA = MG = LG = M5C = MG = L5C = M5C = MT = MG = M5C = MA |
| 4825 | CO-15969 | MG = M5C = MG = M5C = MT = LA = MT = M5C = LA = MT = M5C = LT = M5C = MT = LA = MG = M5C = MA = MA = MA |
| 4826 | CO-15970 | MT = M5C = MT = MG = M5C = L5C = MT = MG = LG = M5C = M5C = L5C = MA = MG = LG = M5C = M5C = M5C = MT = MT |
| 4827 | CO-15971 | MA = MT = M5C = M5C = MA = LT = M5C = MT = L5C = MT = MG = L5C = M5C = MT = LG = MG = M5C = M5C = M5C = MA |
| 4828 | CO-15972 | MT = M5C = MT = M5C = M5C = L5C = MA = MT = L5C = MA = MT = L5C = M5C = MA = LT = M5C = MT = M5C = MT = MG |
| 4829 | CO-15973 | M5C = M5C = M5C = MA = MT = L5C = MT = M5C = L5C = M5C = MA = LT = M5C = MA = LT = M5C = M5C = MA = MT = M5C |
| 4830 | CO-15974 | MT = M5C = MT = M5C = MT = L5C = M5C = MT = LG = MG = M5C = L5C = M5C = MA = LT = M5C = MT = M5C = M5C = M5C |
| 4831 | CO-15975 | MG = MG = MG = M5C = M5C = LT = M5C = MT = L5C = M5C = MT = L5C = MT = M5C = LT = M5C = M5C = MT = MG = MG |
| 4832 | CO-15976 | MT = M5C = M5C = M5C = MT = LG = MG = MG = L5C = M5C = MT = L5C = MT = M5C = L5C = MT = M5C = MT = M5C = MT |
| 4833 | CO-15977 | MG = M5C = MT = MT = MT = L5C = M5C = M5C = LT = MG = MG = LG = M5C = M5C = LT = M5C = MT = M5C = M5C = MT |
| 4834 | CO-15978 | MG = MT = MG = M5C = MA = LG = MA = M5C = LA = M5C = MT = LG = M5C = M5C = LG = MT = MT = M5C = M5C = MT |
| 4835 | CO-15979 | M5C = M5C = M5C = M5C = MT = LG = MT = MG = L5C = MA = MG = LA = M5C = MA = L5C = MT = MG = M5C = M5C = MG |
| 4836 | CO-15980 | M5C = M5C = MA = MT = M5C = L5C = M5C = M5C = LT = MG = MT = LG = M5C = MA = LG = MA = M5C = MA = M5C = MT |
| 4837 | CO-15981 | MA = MG = MT = M5C = MT = L5C = M5C = MA = LT = M5C = M5C = L5C = M5C = MT = LG = MT = MG = M5C = MA = MG |
| 4838 | CO-15982 | M5C = MT = MT = MG = M5C = LT = M5C = MA = LG = MG = M5C = LT = MG = M5C = LA = MG = M5C = MA = MG = MT |
| 4839 | CO-15983 | MG = MT = MT = M5C = M5C = LT = MT = MG = L5C = MT = M5C = LA = MG = MG = L5C = MT = MG = M5C = MA = MG |
| 4840 | CO-15984 | MT = M5C = MA = MG = M5C = LT = M5C = M5C = LA = MG = MT = LT = M5C = M5C = LT = MT = MG = M5C = MT = M5C |
| 4841 | CO-15985 | MG = MG = MT = MT = MG = LG = M5C = MT = L5C = M5C = M5C = L5C = MT = MT = LT = MT = MG = MG = MG = MA |
| 4842 | CO-15986 | MG = M5C = M5C = MA = M5C = LT = MT = MT = LT = MT = M5C = L5C = MT = MG = L5C = MT = M5C = MA = MT = MT |
| 4843 | CO-15987 | M5C = MT = M5C = M5C = MG = LA = MG = MG = LG = M5C = M5C = LT = MG = MG = LG = MA = MA = M5C = MG = MA |
| 4844 | CO-15988 | MA = MG = M5C = M5C = MG = LG = MA = MG = LG = MG = MG = L5C = MG = M5C = LG = M5C = MG = MA = M5C = M5C |
| 4845 | CO-15989 | MT = MG = MG = MG = MT = LG = MG = MT = LT = M5C = M5C = L5C = MG = M5C = LG = MG = M5C = MG = MG = M5C |
| 4846 | CO-15990 | MA = MA = MG = M5C = MA = LG = MG = MG = LA = M5C = M5C = LA = M5C = MA = L5C = M5C = MA = MT = MT = M5C |
| 4847 | CO-15991 | MG = MA = MA = MG = MG = LG = MG = M5C = LT = MT = MT = L5C = MT = MA = L5C = M5C = MT = M5C = M5C = M5C |
| 4848 | CO-15992 | MA = MG = MT = MA = MA = LT = MT = MG = L5C = MA = MG = LT = MG = MA = L5C = MG = M5C = M5C = M5C = M5C |
| 4849 | CO-15993 | MT = M5C = MT = MG = MA = LT = MA = M5C = LA = M5C = MT = LA = MG = MG = LG = MG = MG = MA = MG = MT |
| 4850 | CO-15994 | MG = MA = MA = M5C = M5C = LG = M5C = MT = LT = MA = M5C = LT = MG = MA = LA = MA = M5C = MT = M5C = M5C |
| 4851 | CO-15995 | MG = M5C = M5C = MG = M5C = LG = M5C = MA = LG = MA = M5C = L5C = MT = M5C = LT = M5C = MG = M5C = M5C = MT |
| 4852 | CO-15996 | M5C = MA = MA = MG = MG = LA = M5C = M5C = LG = M5C = MG = LG = MA = MG = LT = M5C = MG = MG = MA = M5C |
| 4853 | CO-15997 | MA = MG = MT = M5C = MT = LG = MA = MG = L5C = MG = M5C = LT = MA = M5C = L5C = M5C = MG = MG = MT = MT |
| 4854 | CO-15998 | MA = MG = MG = MT = MA = LG = MG = M5C = LG = MG = MG = LT = M5C = MA = LT = M5C = MG = M5C = MG = M5C |
| 4855 | CO-15999 | MA = MG = M5C = MG = MG = LG = MT = MA = LG = M5C = M5C = L5C = MT = MG = LA = MT = M5C = M5C = M5C = MT |
| 4856 | CO-16000 | M5C = M5C = MT = M5C = MT = LA = MT = MA = LT = MT = MG = LA = MT = MA = LA = MG = MT = MA = MG = M5C |
| 4857 | CO-16001 | MG = MA = MG = MT = MG = LA = MT = MT = LT = MG = MA = LG = MT = MA = LG = MA = MA = MA = MA = MG |
| 4858 | CO-16002 | MG = MA = MT = M5C = M5C = L5C = MT = MA = LG = MA = MA = LA = MT = MG = LG = MG = MG = MT = MG = MT |
| 4859 | CO-16003 | M5C = MG = MA = M5C = MG = LT = M5C = MA = L5C = MA = MT = LG = MA = MT = LT = M5C = MT = M5C = M5C = MA |
| 4860 | CO-16004 | MT = MA = MA = MG = MG = LA = MA = MG = LG = M5C = MG = LA = M5C = MG = LA = MG = M5C = MA = M5C = M5C |
| 4861 | CO-16005 | MA = MA = MT = MG = M5C = L5C = M5C = M5C = LA = MG = MA = L5C = MA = M5C = LG = M5C = MG = M5C = MT = MA |
| 4862 | CO-16006 | MA = MA = MA = MG = MG = L5C = MG = MA = LG = M5C = MA = L5C = MA = MA = LA = MT = MA = MT = MT = M5C |
| 4863 | CO-16007 | M5C = MA = MG = MA = MA = L5C = MA = MA = LA = M5C = MA = LA = MA = M5C = LA = MA = MA = MA = MG = MG |
| 4864 | CO-16008 | MA = MA = M5C = MA = M5C = LA = M5C = MA = LA = MG = MT = L5C = M5C = MG = LG = MG = M5C = MG = M5C = MG |
| 4865 | CO-16009 | MG = MT = MG = MA = MG = L5C = MT = MA = LT = MG = MA = LT = M5C = MA = LG = M5C = MT = MT = MG = MG |
| 4866 | CO-16010 | MA = MG = MA = MA = MT = L5C = MG = M5C = LT = MT = MT = LG = MG = MG = LA = MG = M5C = MA = MG = MG |
| 4867 | CO-16011 | M5C = MA = MT = MT = MT = LG = MT = MA = LA = MT = M5C = L5C = M5C = MA = LG = M5C = MG = M5C = M5C = MT |
| 4868 | CO-16012 | MA = MG = MG = MA = MG = L5C = MG = MA = LG = M5C = M5C = LA = MG = M5C = LT = M5C = MA = MG = MT = MA |
| 4869 | CO-16013 | MG = MA = MA = MT = MA = LG = MG = MG = L5C = MA = MG = LG = MA = M5C = LA = MG = MG = MA = M5C = MA |
| 4870 | CO-16014 | MA = MT = MG = MT = M5C = LA = MA = M5C = L5C = MG = MA = LG = MT = MT = LT = MG = MG = MA = MG = MA |
| 4871 | CO-16015 | MT = MT = M5C = MA = MA = L5C = MT = M5C = LA = M5C = MT = L5C = MT = MG = LG = MG = MG = M5C = M5C = MT |
| 4872 | CO-16016 | MG = MG = MG = M5C = MT = LT = MT = MG = LG = MG = MG = L5C = MT = MG = LT = MT = MT = MA = MT = M5C |
| 4873 | CO-16017 | MA = MA = MT = M5C = M5C = L5C = MT = MG = L5C = MT = M5C = L5C = M5C = MT = LG = MT = M5C = M5C = MT = MG |
| 4874 | CO-16018 | MA = MT = MT = MA = MG = LA = MT = MT = L5C = MA = MG = L5C = M5C = MT = LG = MA = MG = MA = M5C = MT |
| 4875 | CO-16019 | MT = MA = M5C = MA = M5C = L5C = MT = MG = LG = M5C = MA = LA = M5C = MT = LG = MG = M5C = MG = M5C = MA |
| 4876 | CO-16020 | M5C = M5C = MT = MG = MG = LA = MG = MA = L5C = MA = MA = LT = M5C = MT = LA = M5C = MT = MT = M5C = M5C |
| 4877 | CO-16021 | MG = MT = MG = MG = MA = LA = MT = MG = LA = MA = MA = LT = M5C = MT = L5C = MT = MT = M5C = MT = MT |
| 4878 | CO-16022 | MT = M5C = MA = MG = M5C = LT = M5C = MA = LA = MG = MG = LA = MG = MA = LT = MG = M5C = MT = M5C = M5C |
| 4879 | CO-16023 | M5C = MT = M5C = M5C = MA = L5C = M5C = MT = LG = M5C = M5C = LA = MG = MT = LT = MA = MA = MA = MA = MT |
| 4880 | CO-16024 | M5C = M5C = MA = MT = M5C = LT = MG = MG = LT = MT = MT = L5C = M5C = M5C = LA = MG = MG = MG = M5C = MT |
| 4881 | CO-16025 | MG = MG = M5C = MA = MT = LT = MG = MA = LA = M5C = MA = LT = MG = MG = L5C = MA = MT = MT = M5C = MA |
| 4882 | CO-16026 | MG = MG = M5C = MA = M5C = L5C = M5C = MA = LG = M5C = MA = LG = M5C = MT = L5C = M5C = MT = MG = MA = MA |
| 4883 | CO-16027 | M5C = MT = MT = M5C = MT = L5C = MT = MT = LT = M5C = MG = LA = M5C = MA = LG = M5C = M5C = M5C = M5C = M5C |
| 4884 | CO-16028 | M5C = MA = MG = MG = MG = L5C = M5C = MG = LA = MT = M5C = LT = MG = MG = LA = MG = MA = M5C = MT = MA |
| 4885 | CO-16029 | M5C = M5C = MT = M5C = M5C = L5C = MA = MT = LA = MT = M5C = LA = MA = MT = LT = M5C = M5C = MT = M5C = MG |
| 4886 | CO-16030 | MT = MG = MT = M5C = MA = L5C = MT = MG = LG = M5C = MT = LA = MA = MT = L5C = MT = MG = MT = MT = M5C |
| 4887 | CO-16031 | MT = MT = MT = MG = MG = L5C = MA = M5C = L5C = MA = MA = LG = M5C = MA = LG = MG = M5C = MT = MG = MA |
| 4888 | CO-16032 | MA = M5C = MG = MG = M5C = L5C = M5C = MA = LG = MT = MA = LT = M5C = MA = LG = MG = M5C = MT = MT = MT |
| 4889 | CO-16033 | M5C = M5C = MT = M5C = MA = LT = M5C = M5C = LT = M5C = MA = LG = M5C = MT = L5C = M5C = MA = MG = MT = MT |
| 4890 | CO-16034 | M5C = MG = MA = MG = M5C = LT = MT = MG = LG = MT = MT = LA = MG = M5C = L5C = MA = MT = M5C = M5C = M5C |
| 4891 | CO-16035 | MT = M5C = M5C = M5C = MT = L5C = M5C = MT = L5C = M5C = MG = LA = M5C = MT = LT = M5C = MT = MG = M5C = MT |
| 4892 | CO-16036 | MA = M5C = MG = MA = M5C = LT = M5C = M5C = LA = M5C = MA = LG = M5C = MT = L5C = MG = MG = MT = MT = MG |
| 4893 | CO-16037 | MG = M5C = MT = M5C = MT = LA = MG = M5C = LT = M5C = M5C = LA = MG = MG = L5C = MT = MT = MA = MG = MA |
| 4894 | CO-16038 | MG = M5C = M5C = MA = MG = LG = MT = MG = LT = M5C = MT = LT = MA = MT = L5C = M5C = MG = M5C = MT = MG |
| 4895 | CO-16039 | MT = M5C = MA = M5C = M5C = LA = MG = MG = LG = M5C = MA = L5C = MA = MG = LA = M5C = MT = MA = MG = MT |
| 4896 | CO-16040 | MA = M5C = MA = MG = MG = LA = MA = MG = LG = MA = MA = LA = MA = MT = LA = MA = MG = M5C = MA = M5C |
| 4897 | CO-16041 | MA = M5C = MT = MA = MT = LA = M5C = MT = L5C = M5C = M5C = LT = MA = MG = LT = M5C = MT = M5C = MA = MA |
| 4898 | CO-16042 | MG = MT = MG = MT = MG = LT = MG = MT = LT = MT = M5C = LA = MA = MT = LA = MG = MA = MA = MG = M5C |
| 4899 | CO-16043 | MT = MG = MA = MT = M5C = LG = MA = MT = LT = M5C = MA = L5C = M5C = MT = LA = MA = M5C = MA = MT = MT |
| 4900 | CO-16044 | MT = MT = MT = MT = MT = L5C = MT = MG = LG = MT = MT = L5C = MT = MG = LG = MG = MT = MG = MG = MT |
| 4901 | CO-16045 | MT = MT = MG = MT = MT = LT = M5C = MA = LG = MT = M5C = LT = MG = MT = LT = MT = MA = MG = MG = MT |
| 4902 | CO-16046 | MG = MA = MA = MT = M5C = LA = M5C = MG = LG = M5C = MT = LT = MT = MG = LA = M5C = MG = MA = MT = MT |
| 4903 | CO-16047 | MG = MT = M5C = M5C = M5C = LT = MG = MG = L5C = M5C = MG = LG = M5C = MA = LA = MA = MA = MT = MT = MG |
| 4904 | CO-16048 | MG = MA = MT = MT = MG = LT = M5C = MT = L5C = M5C = MA = LG = MA = M5C = LA = M5C = MT = M5C = M5C = MT |
| 4905 | CO-16049 | MA = M5C = M5C = MA = MG = LA = MT = MG = L5C = M5C = MA = LG = MT = MG = LT = M5C = M5C = M5C = MT = M5C |
| 4906 | CO-16050 | MG = MT = MG = MA = MT = LG = MT = MT = LT = MA = MG = LT = MG = MG = LG = MA = MT = MT = MG = M5C |
| 4907 | CO-16051 | MG = MT = MG = MG = MG = LG = MG = MA = LT = MT = MG = LT = MT = M5C = LT = MG = MT = MG = MT = MG |
| 4908 | CO-16052 | MG = MA = M5C = M5C = MT = LT = MT = MT = LG = MG = MG = L5C = MA = MG = LG = MA = MT = MA = M5C = MT |
| 4909 | CO-16053 | MA = MG = MT = MA = MG = LG = MT = MT = LG = MT = MT = LG = MA = MG = LT = M5C = MT = M5C = MA = MG |
| 4910 | CO-16054 | MA = MT = M5C = MG = MT = LG = MG = M5C = LA = M5C = M5C = LT = MT = MA = L5C = M5C = M5C = MT = MT = M5C |
| 4911 | CO-16055 | MG = MA = MG = MT = MA = LG = MG = MG = LA = MA = MT = LT = MA = M5C = LA = MG = MA = M5C = M5C = MT |
| 4912 | CO-16056 | MT = MT = MG = MT = MG = LT = MT = MG = LG = M5C = MG = LG = MG = MG = LG = MT = MG = MG = MA = MT |
| 4913 | CO-16057 | MG = M5C = MA = MT = MA = LA = M5C = MT = L5C = MT = M5C = LT = MT = MA = LA = MG = MA = M5C = MA = M5C |
| 4914 | CO-16058 | MG = MG = M5C = MT = MG = L5C = M5C = MT = LT = M5C = MT = LG = MT = MG = LG = MT = MG = MA = MT = MA |
| 4915 | CO-16059 | M5C = MT = MA = MG = MG = LG = MT = MT = LA = MG = MG = LG = MA = MG = LG = MG = MT = MG = MA = M5C |

TABLE 18
Exemplary ASOs targeting mGrn regRNA with chemical modifications

| | | Chemistry and Sequence |
|---|---|---|
| SEQ | | MOE (M); DNA (d); LNA (L); 2′ OMethyl (m); |
| ID | | PS (=); PO(−); 5-MethylCytosine (5C); Biotin (BioTEG); |
| NO | Name | Palmitic acid (Palm); Spacer 18 (C18) |
| 443 | CO-3544 | MG = MT = MT = M5C = MT = M5C = M5C = |
| | | M5C = MT = MA = MG = M5C = MT = MG = MT = MG = MT = MA = MG = MT |
| 444 | CO-3545 | M5C = MT = MA = MG = MT = MG = MG = MA = MA = MG = |
| | | MA = MT = MG = MT = M5C = MG = MG = MA = MG = M5C |
| 445 | CO-3546 | MG = MA = MA = MA = MT = MT = M5C = MA = MT = |
| | | MT = MT = M5C = M5C = M5C = M5C = MT = M5C = MG = MA = M5C |
| 446 | CO-3547 | MA = MT = M5C = MT = MG = MG = MA = MT = MT = MG = |
| | | MG = M5C = MT = M5C = MA = M5C = M5C = MT = MT = MT |
| 447 | CO-3548 | M5C = MA = M5C = MT = MT = MT = MT = M5C = M5C = |
| | | M5C = M5C = M5C = MG = M5C = MT = MG = M5C = M5C = MT = M5C |
| 448 | CO-3549 | MA = MG = M5C = MT = MA = MA = MT = MT = MT = |
| | | M5C = M5C = MG = M5C = M5C = MT = M5C = MT = M5C = M5C = M5C |
| 449 | CO-3550 | MG = MG = MT = MT = MG = MT = MG = MT = M5C = |
| | | MA = MG = M5C = MT = MT = MT = MA = MT = MT = MT = M5C |
| 450 | CO-3551 | MG = M5C = MG = MT = MG = MA = MT = MG = MG = |
| | | M5C = MT = MG = MA = MG = MT = M5C = M5C = M5C = MT = MG |
| 451 | CO-3552 | M5C = M5C = MT = MT = MG = MG = M5C = M5C = M5C = |
| | | M5C = M5C = MA = MG = MA = MG = M5C = MT = M5C = MA = MA |
| 452 | CO-3553 | M5C = MA = MA = MG = MT = MG = MT = MT = M5C = |
| | | MT = M5C = MT = MG = M5C = MG = MG = M5C = MG = MG = M5C |
| 453 | CO-3554 | MG = MG = M5C = MT = M5C = MT = MT = MT = M5C = |
| | | MT = M5C = MT = MT = MT = M5C = MG = MG = MA = M5C = MG |
| 454 | CO-3555 | M5C = MT = M5C = MT = MT = MG = MT = M5C = M5C = |
| | | MG = MT = MA = M5C = MT = MT = M5C = M5C = M5C = MA = M5C |
| 455 | CO-3556 | MA = MG = MG = MA = M5C = MA = MG = MG = MA = |
| | | MA = M5C = M5C = MA = M5C = M5C = M5C = M5C = MA = M5C = MT |
| 456 | CO-3557 | MT = MG = MT = M5C = MG = MG = MA = MA = MA = |
| | | MG = M5C = MT = MG = M5C = MA = MG = MG = M5C = M5C = MT |
| 457 | CO-3558 | MT = M5C = M5C = M5C = M5C = M5C = M5C = M5C = |
| | | MA = MA = MT = MA = MA = MG = MA = MG = MG = M5C = MT = MT |
| 458 | CO-3559 | MG = MT = MT = MG = MT = MA = MG = MA = MG = |
| | | MA = M5C = MA = M5C = M5C = MT = M5C = M5C = M5C = M5C = MG |
| 459 | CO-3560 | MT = MG = MA = MT = MG = M5C = MA = M5C = MT = |
| | | MA = MA = M5C = MG = MA = MG = MG = MT = MT = MG = MT |
| 460 | CO-3561 | M5C = M5C = MT = M5C = MT = MT = MG = MA = MA = |
| | | MA = M5C = MT = M5C = M5C = M5C = M5C = MT = MA = MG-MG |
| 461 | CO-3562 | MG = M5C = M5C = MT = MG = MT = MG = M5C = MA = |
| | | MA = MT = MT = MG = MA = MG-MG = MG = MT = M5C = M5C |
| 462 | CO-3563 | MG = M5C = MA = MG = MA = M5C = MA = MA = MT = |
| | | M5C = MT = M5C = M5C = M5C = M5C = MG = MG = M5C = MT = MA |
| 463 | CO-3564 | MA = M5C = MG = M5C = MA = MG = MG = MT = MA = |
| | | MG = MG = MA = MG = MG = MA = M5C = M5C = M5C = MT = M5C |
| 464 | CO-3565 | MG = MA = MG = M5C = MT = MG = MA = M5C = M5C = |
| | | MG = M5C = M5C = MA = MG = MA = MT = MG = M5C = M5C = MT |
| 465 | CO-3566 | MG = M5C = MT = MA = MA = MT = MG = MG = MA = |
| | | MA = MA = MT = MT = MG = MA = MG = MG = MT = MG = MG |
| 466 | CO-3567 | M5C = M5C = M5C = MT = MG = MG = MA = MT = M5C = |
| | | MT = M5C = M5C = MG = MA = MG = M5C = MA = MA = MT = MG |
| 467 | CO-3568 | M5C = M5C = MG = M5C = M5C = MT = M5C = MT = MA = |
| | | M5C = MG = MT = MA = MG = MA = M5C = MA = MA = MG = MT |
| 468 | CO-3569 | MG = MG = MA = MA = MT = MG = MT = MG = MA = |
| | | MA = M5C = MT = MG = MA = MG = MT = MA = MG = MA = MA |
| 469 | CO-3570 | M5C = MT = MA = MA = MT = M5C = MA = M5C = MA = |
| | | MT = MG = MA = MT = M5C = M5C = M5C = MT = MA = MG = MA |
| 470 | CO-3571 | MG = M5C = MT = MA = MT = MG = MT = MT = MG = |
| | | MT = M5C = MA = MT = MA = MT = MG = MA = MT = MT = M5C |
| 471 | CO-3572 | MG = M5C = M5C = MG = M5C = M5C = MA = MG = MA = |
| | | MA = M5C = M5C = M5C = MA = MA = MA = M5C = M5C = MA = MG |
| 472 | CO-3573 | MG = MT = M5C = MT = M5C = MA = MT = M5C = MT = |
| | | M5C = MT = MG = M5C = MA = MA = M5C = MA = M5C = MT = M5C |
| 473 | CO-3574 | MG = M5C = MT = M5C = MT = M5C = M5C = MT = MA = |
| | | MA = M5C = MT = MG = MT = MG = MG = MG = MT = MG = M5C |
| 474 | CO-3575 | MG = MT = MA = MA = MA = M5C = MG = MA = M5C = |
| | | M5C = MT = MT = MG = MA = MA = M5C = MG = M5C = MG = MT |
| 475 | CO-3576 | MA = MT = MG = MT = MA = M5C = MA = MA = MA = |
| | | MA = MG = MT = M5C = M5C = M5C = MG = MA = MT = M5C = M5C |
| 476 | CO-3577 | M5C = MT = MG = M5C = M5C = MA = MG = MG = M5C = |
| | | MG = MT = MG = MA = MA = MG = MA = MG = MA = M5C = MA |
| 477 | CO-3578 | MT = MT = M5C = M5C = MA = MA = M5C = MT = MG = |
| | | MG = MT = MT = MT = M5C = MG = MA = MG = MT = M5C = M5C |
| 478 | CO-3579 | MG = MA = M5C = MT = MA = MT = MT = MT = MA = |
| | | MT = M5C = MT = MT = M5C = MA = M5C = M5C = M5C = MT = M5C |
| 479 | CO-3580 | MG = M5C = M5C = MA = M5C = MT = M5C = MT = M5C = |
| | | M5C = M5C = M5C = MA = MT = MT = M5C = MA = MA = MA = M5C |
| 480 | CO-3581 | M5C = MG = M5C = M5C = M5C = MT = MT = MG = MA = |
| | | MA = M5C = M5C = MT = MT = MT = MA = MT = MT = MA = MG |
| 481 | CO-3582 | M5C = MA = M5C = MA = MT = M5C = MT = MA = M5C = |
| | | MA = MG = MT = MG = M5C = M5C = M5C = MG = MG = MT = MA |
| 482 | CO-3583 | MT = M5C = M5C = M5C = M5C = M5C = M5C = MA = |
| | | MG = MT = MT = MT = MG = MA = MG = M5C = M5C = MA = MA = MT |
| 483 | CO-3584 | MG = M5C = MT = MT = M5C = MA = MA = MT = MT = |
| | | MT = MA = MA = MT = MG = M5C = MA = MG = MT = MG = M5C |
| 484 | CO-3585 | MG = MT = M5C = M5C = M5C = MA = M5C = M5C = MT = |
| | | MT = MA = MT = M5C = MA = MG = M5C = M5C = MT = M5C = MT |
| 485 | CO-3586 | MA = MA = MT = M5C = MT = MA = MG = MT = MT = |
| | | MT = M5C = MA = MA = MG = MT = MT = M5C = M5C = MT = M5C |
| 486 | CO-3587 | MT = MA = M5C = M5C = M5C = MA = MA = MG = MG = |
| | | MA = MA = MA = MG = MG = MA = MT = MT = M5C = MA = M5C |
| 487 | CO-3588 | MG = MT = M5C = MT = MG = MT = MA = MA = MA = |
| | | MG = MA = MA = M5C = MA = MA = MG = MA = MT = MA = MT |
| 488 | CO-3589 | MT = MT = MT = M5C = MA = MA = M5C = M5C = M5C = |
| | | MT = MT = MG = M5C = MT = MA = MG = MA = MG = MG = M5C |
| 489 | CO-3590 | MT = MA = MA = MT = MG = M5C = M5C = M5C = MT = |
| | | MT = MA = MT = M5C = MT = MT = MG = MA = MA = M5C = MG |
| 490 | CO-3591 | M5C = M5C = MA = M5C = M5C = MA = MG = M5C = M5C = |
| | | MT = MA = M5C = MT = M5C = M5C = MA = M5C = MA = MG = MG |
| 491 | CO-3592 | MG = MA = MA = MA = M5C = M5C = M5C = M5C = MT = |
| | | MT = M5C = M5C = MA = MT = M5C = MT = M5C = MG = MA = M5C |
| 492 | CO-3593 | M5C = MA = MT = MA = MA = M5C = MA = MA = MT = |
| | | MT = M5C = M5C = MT = M5C = MG = MA = MA = MG = MG = MT |
| 493 | CO-3594 | M5C = MA = MT = MG = MG = MT = M5C = MT = M5C = |
| | | MT = MA = MT = MT = M5C = MA = M5C = M5C = M5C = MA = M5C |
| 494 | CO-3595 | M5C = M5C = MT = MG = MA = MA = M5C = MT = MG = |
| | | MT = MA = MT = MG = MG = M5C = MT = MG = MA = M5C = M5C |
| 495 | CO-3596 | M5C = MT = M5C = MT = MA = MT = MG = MT = MA = |
| | | MA = MG = MA = M5C = MT = M5C = M5C = M5C = MA = M5C = MT |
| 496 | CO-3597 | MA = M5C = MA = MA = M5C = M5C = M5C = MT = MG = |
| | | M5C = MA = MT = MG = M5C = MA = M5C = MT = M5C = M5C = MT |
| 497 | CO-3598 | MT = MA = MA = MG = MA = MA = MG = M5C = M5C = |
| | | M5C = MT = M5C = MA = M5C = MG = MG = MA = MA = MT = MT |
| 498 | CO-3599 | MA = MT = MG = MA = MT = MG = M5C = MA = M5C = |
| | | M5C = MA = MG = MT = M5C = MT = MT = MA = M5C = MA = M5C |
| 499 | CO-3600 | MG = MG = MA = MA = M5C = MA = M5C = M5C = MT = |
| | | MA = MT = MG = M5C = MT = MA = MA = M5C = MA = M5C = M5C |
| 500 | CO-4078 | MG = MT = MT = M5C = MT = dC = dC = dC = dT = |
| | | dA = dG = dC = dT = dG = dT = MG = MT = MA = MG = MT |
| 501 | CO-4079 | M5C = M5C = MT = MG = MA = dA = dC = dT = dG = |
| | | dT = dA = dT = dG = dG = dC = MT = MG = MA = M5C = M5C |
| 502 | CO-4080 | MG = MT = MT = M5C = MT = dC = dC = dC = MT = |
| | | dA = dG = M5C = dT = dG = dT = MG = MT = MA = MG = MT |
| 503 | CO-4081 | M5C = M5C = MT = MG = MA = dA = dC = dT = MG = |
| | | dT = dA = MT = dG = dG = dC = MT = MG = MA = M5C = M5C |
| 504 | CO-4082 | MG = MT = MT = M5C = MT = L5C = M5C = M5C = |
| | | LT = MA = MG = L5C = MT = MG = LT = MG = MT = MA = MG = MT |
| 505 | CO-4083 | M5C = M5C = MT = MG = MA = LA = M5C = MT = LG = |
| | | MT = MA = LT = MG = MG = L5C = MT = MG = MA = M5C = M5C |
| 506 | CO-4084 | MA = MG = MT = MT = M5C = MT = M5C = M5C = M5C = |
| | | MT = MA = MG = M5C = MT = MG = MT = MG = MT = MA = MG = MT = MG |
| 507 | CO-4085 | M5C = MA = MG = MT = MT = M5C = MT = M5C = M5C = |
| | | M5C = MT = MA = MG = M5C = MT = MG = MT = MG = MT = MA = MG = MT = |
| | | MG = MT |
| 508 | CO-4086 | MT = M5C = M5C = MT = MG = MA = MA = M5C = MT = |
| | | MG = MT = MA = MT = MG = MG = M5C = MT = MG = MA = M5C = M5C = M5C |
| 509 | CO-4087 | MG = MT = M5C = M5C = MT = MG = MA = MA = M5C = |
| | | MT = MG = MT = MA = MT = MG = MG = M5C = MT = MG = MA = M5C = M5C = |
| | | M5C = M5C |
| 510 | CO-4088 | MT = MT = M5C = MT = M5C = M5C = M5C = MT = MA = |
| | | MG = M5C = MT = MG = MT = MG = MT = MA = MG = MT = MG |
| 511 | CO-4089 | M5C = MA = MG = MT = MT = M5C = MT = M5C = M5C = |
| | | M5C = MT = MA = MG = M5C = MT = MG = MT = MG = MT = MA |
| 512 | CO-4090 | M5C = MT = M5C = M5C = MA = MG = MT = MT = M5C = |
| | | MT = M5C = M5C = M5C = MT = MA = MG = M5C = MT = MG = MT |
| 513 | CO-4091 | MA = MG = MG = M5C = MT = M5C = M5C = MA = MG = |
| | | MT = MT = M5C = MT = M5C = M5C = M5C = MT = MA = MG = M5C |
| 514 | CO-4092 | MG = MA = MA = MA = MG = MG = M5C = MT = M5C = |
| | | M5C = MA = MG = MT = MT = M5C = MT = M5C = M5C = M5C = MT |
| 515 | CO-4093 | MT = MG = MT = MA = MT = MG = MG = M5C = MT = |
| | | MG = MA = M5C = M5C = M5C = M5C = M5C = MA = MT = MG = MG |
| 516 | CO-4094 | MA = MA = M5C = MT = MG = MT = MA = MT = MG = |
| | | MG = M5C = MT = MG = MA = M5C = M5C = M5C = M5C = M5C = MA |
| 517 | CO-4095 | MT = MG = MA = MA = M5C = MT = MG = MT = MA = |
| | | MT = MG = MG = M5C = MT = MG = MA = M5C = M5C = M5C = M5C |
| 518 | CO-4096 | M5C = MT = MG = MA = MA = M5C = MT = MG = MT = |
| | | MA = MT = MG = MG = M5C = MT = MG = MA = M5C = M5C = M5C |
| 519 | CO-4097 | MT = M5C = M5C = MT = MG = MA = MA = M5C = MT = |
| | | MG = MT = MA = MT = MG = MG = M5C = MT = MG = MA = M5C |
| 520 | CO-4098 | MG = MT = M5C = M5C = MT = MG = MA = MA = M5C = |
| | | MT = MG = MT = MA = MT = MG = MG = M5C = MT = MG = MA |
| 521 | CO-4099 | M5C = MT = MG = MT = M5C = M5C = MT = MG = MA = |
| | | MA = M5C = MT = MG = MT = MA = MT = MG = MG = M5C = MT |
| 522 | CO-4100 | M5C = M5C = MA = M5C = MT = MG = MT = M5C = |
| | | M5C = MT = MG = MA = MA = M5C = MT = MG = MT = MA = MT = MG |
| 523 | CO-4101 | MA = M5C = MT = M5C = M5C = M5C = MA = M5C = |
| | | MT = MG = MT = M5C = M5C = MT = MG = MA = MA = M5C = MT = MG |
| 524 | CO-4102 | MA = MA = MG = MA = M5C = MT = M5C = M5C = |
| | | M5C = MA = M5C = MT = MG = MT = M5C = M5C = MT = MG = MA = MA |
| 525 | CO-4103 | MT = MA = MT = MG = MT = MA = MA = MG = MA = |
| | | M5C = MT = M5C = M5C = M5C = MA = M5C = MT = MG = MT = M5C |
| 526 | CO-4403 | MG = MT = MT = M5C = MT = L5C = dC = dC = LT = |
| | | dA = dG = L5C = dT = dG = LT = MG = MT = MA = MG = MT |
| 527 | CO-4404 | MG = MT = MT = L5C = MT = L5C = M5C = L5C = MT = |
| | | LA = MG = L5C = MT = LG = MT = LG = MT = LA = MG = MT |
| 528 | CO-4405 | MG = MT = LT = M5C = LT = M5C = L5C = M5C = LT = |
| | | MA = LG = M5C = LT = MG = LT = MG = LT = MA = MG = MT |
| 529 | CO-4406 | MG = MT = LT = M5C = MT = L5C = M5C = M5C = LT = |
| | | MA = MG = L5C = MT = MG = LT = MG = MT = LA = MG = MT |
| 530 | CO-4407 | MG = MT = MT = M5C = LT = M5C = M5C = M5C = |
| | | LT = MA = MG = M5C = LT = MG = MT = MG = LT = MA = MG = MT |
| 531 | CO-4408 | MG = MT = MT = L5C = MT = M5C = M5C = L5C = |
| | | MT = MA = MG = L5C = MT = MG = MT = LG = MT = MA = MG = MT |
| 532 | CO-4409 | MG = MT = MT = M5C = MT = L5C = M5C = M5C = |
| | | MT = MA = LG = M5C = MT = MG = MT = LG = MT = MA = MG = MT |
| 533 | CO-4410 | MG = MT = MT = M5C = LT = M5C = M5C = M5C = |
| | | MT = LA = MG = M5C = MT = MG = LT = MG = MT = MA = MG = MT |
| 534 | CO-4411 | M5C = M5C = MT = MG = MA = LA = dC = dT = LG = |
| | | dT = dA = LT = dG = dG = L5C = MT = MG = MA = M5C = M5C |
| 535 | CO-4412 | M5C = M5C = MT = LG = MA = LA = M5C = LT = MG = |
| | | LT = MA = LT = MG = LG = M5C = LT = MG = LA = M5C = M5C |
| 536 | CO-4413 | M5C = M5C = LT = MG = LA = MA = L5C = MT = LG = |
| | | MT = LA = MT = LG = MG = L5C = MT = LG = MA = M5C = M5C |
| 537 | CO-4414 | M5C = M5C = LT = MG = MA = LA = M5C = MT = LG = |
| | | MT = MA = LT = MG = MG = L5C = MT = MG = LA = M5C = M5C |
| 538 | CO-4415 | M5C = M5C = MT = MG = LA = MA = M5C = MT = LG = |
| | | MT = MA = MT = LG = MG = M5C = MT = LG = MA = M5C = M5C |
| 539 | CO-4416 | M5C = M5C = MT = LG = MA = MA = M5C = LT = MG = |
| | | MT = MA = LT = MG = MG = M5C = LT = MG = MA = M5C = M5C |
| 540 | CO-4417 | M5C = M5C = MT = MG = MA = LA = M5C = MT = MG = |
| | | MT = LA = MT = MG = MG = M5C = LT = MG = MA = M5C = M5C |
| 541 | CO-4418 | M5C = M5C = MT = MG = LA = MA = M5C = MT = MG = |
| | | LT = MA = MT = MG = MG = L5C = MT = MG = MA = M5C = M5C |
| 542 | CO-4419 | MA = MG = MT = MT = M5C = dT = M5C = dC = dC = |
| | | MT = dA = dG = M5C = dT = dG = MT = dG = MT = MA = MG = MT = MG |
| 543 | CO-4420 | MA = MG = MT = MT = M5C = MT = L5C = M5C = M5C = |
| | | LT = MA = MG = L5C = MT = MG = LT = MG = MT = MA = MG = MT = MG |
| 544 | CO-4421 | M5C = MA = MG = MT = MT = dC = dT = M5C = dC = dC = MT = |
| | | dA = dG = M5C = dT = dG = MT = dG = dT = MA = MG = MT = MG = MT |
| 545 | CO-4422 | M5C = MA = MG = MT = MT = M5C = MT = L5C = M5C = |
| | | M5C = LT = MA = MG = L5C = MT = MG = LT = MG = MT = MA = MG = MT = |
| | | MG = MT |
| 546 | CO-4423 | MA = M5C = M5C = MT = M5C = MT = MG = MT = M5C = |
| | | MT = M5C = M5C = MA = MG = MG = MT = M5C = M5C = MG = MG |
| 547 | CO-4424 | MA = MG = MA = MG = MA = M5C = MA = MA = MG = |
| | | MA = MG = MA = MA = MG = MA = M5C = M5C = MT = MG = M5C |
| 548 | CO-4425 | M5C = MA = MA = MG = MT = MA = MA = M5C = M5C = |
| | | MA = MA = MT = MG = MG = MA = MA = MG = M5C = M5C = M5C |
| 549 | CO-4426 | M5C = MA = M5C = MA = MT = MG = MA = MT = M5C = |
| | | M5C = M5C = MT = MA = MG = MA = MA = MA = MT = MG = MG |
| 550 | CO-4427 | M5C = M5C = MA = MG = MA = MA = MG = M5C = MA = |
| | | MG = MA = M5C = MA = M5C = M5C = M5C = MT = M5C = M5C = MA |
| 551 | CO-4428 | MG = MG = MA = MT = MT = MT = MA = MA = MA = |
| | | MT = M5C = MT = M5C = MT = MT = M5C = MT = MT = M5C = M5C |
| 552 | CO-4437 | MG = M5C = MA = MT = MT = MT = M5C = M5C = MT = |
| | | MG = MT = M5C = MT = MT = MT = M5C = MA = MT = MA = MG |
| 553 | CO-4438 | M5C = MA = MT = MG = MT = MG = MT = MG = MG = |
| | | MG = MT = MG = MG = M5C = MA = MT = MT = MT = M5C = M5C |
| 554 | CO-4439 | MG = MG = M5C = MA = M5C = MT = MT = MG = M5C = |
| | | MA = MA = M5C = M5C = M5C = MT = M5C = M5C = MT = MA = M5C |
| 555 | CO-4440 | MG = MG = MA = MT = MT = M5C = MA = M5C = M5C = |
| | | MT = MT = MA = MT = MA = MG = M5C = M5C = M5C = MA = MA |
| 556 | CO-4441 | MG = MA = MT = MG = MG = M5C = MA = MG = MA = |
| | | MT = M5C = M5C = MT = MT = M5C = MT = MA = MT = MG = MT |
| 557 | CO-4442 | MG = MG = MA = MT = MG = MT = MT = M5C = MT = |
| | | MT = MT = MG = MA = MA = MT = MT = MA = MG = MG = MT |
| 558 | CO-4443 | MA = MG = MA = MT = MG = MG = M5C = M5C = MT = |
| | | M5C = MT = MG = MG = MG = MA = MT = MG = MT = MT = M5C |
| 559 | CO-4444 | M5C = M5C = M5C = MT = MA = M5C = M5C = M5C = |
| | | M5C = MT = MT = M5C = M5C = MT = MG = MG = MT = MT = MA = MG |
| 560 | CO-4445 | M5C = MT = MA = MG = M5C = M5C = M5C = M5C = |
| | | MG = MT = MT = MG = MA = MG = MA = MG = MG = MA = MA = M5C |
| 561 | CO-4446 | MT = M5C = MA = M5C = M5C = MA = M5C = MT = |
| | | M5C = M5C = M5C = MT = MA = MG = M5C = M5C = M5C = M5C = MG = MT |
| 562 | CO-4447 | MG = MT = MA = MG = MT = MG = MT = MA = |
| | | MG = MA = MG = MG = MT = MG = MG = M5C = M5C = MA = MG = MG |
| 563 | CO-4448 | MG = M5C = MT = MG = MT = MG = MT = MA = |
| | | MG = MT = MG = MT = MA = MG = MA = MG = MG = MT = MG = MG |
| 564 | CO-4449 | M5C = M5C = M5C = MT = MA = MG = M5C = MT = |
| | | MG = MT = MG = MT = MA = MG = MT = MG = MT = MA = MG = MA |
| 565 | CO-4450 | M5C = MT = M5C = M5C = M5C = MT = MA = MG = |
| | | M5C = MT = MG = MT = MG = MT = MA = MG = MT = MG = MT = MA |
| 566 | CO-4451 | MT = M5C = MT = M5C = M5C = M5C = MT = MA = |
| | | MG = M5C = MT = MG = MT = MG = MT = MA = MG = MT = MG = MT |
| 567 | CO-4458 | MG = MT = MT-M5C-MT = M5C = M5C = M5C = |
| | | MT = MA = MG = M5C = MT = MG = MT = MG-MT-MA = MG = MT |
| 568 | CO-4459 | MG = MT = MT-M5C-MT-M5C-M5C = M5C = MT = |
| | | MA = MG = M5C = MT = MG-MT-MG-MT-MA = MG = MT |
| 569 | CO-4460 | MG = MT = MT-M5C-MT-M5C-M5C-M5C-MT-MA- |
| | | MG-M5C-MT-MG-MT-MG-MT-MA = MG = MT |
| 570 | CO-4461 | M5C = M5C = MT-MG-MA = MA = M5C = MT = MG = |
| | | MT = MA = MT = MG = MG = M5C = MT-MG-MA = M5C = M5C |
| 571 | CO-4462 | M5C = M5C = MT-MG-MA-MA-M5C = MT = MG = |
| | | MT = MA = MT = MG = MG-M5C-MT-MG-MA = M5C = M5C |
| 572 | CO-4463 | M5C = M5C = MT-MG-MA-MA-M5C-MT-MG-MT- |
| | | MA-MT-MG-MG-M5C-MT-MG-MA = M5C = M5C |
| 963 | CO-5230 | MT = MG = MG = MG = MA = MT = MG = MT = MT = |
| | | M5C = MT = MT = MT = MG = MA = MA = MT = MT = MA = MG |
| 964 | CO-5231 | MT = M5C = MT = MG = MG = MG = MA = MT = MG = |
| | | MT = MT = M5C = MT = MT = MT = MG = MA = MA = MT = MT |
| 965 | CO-5232 | M5C = M5C = MT = M5C = MT = MG = MG = MG = MA = |
| | | MT = MG = MT = MT = M5C = MT = MT = MT = MG = MA = MA |
| 966 | CO-5233 | MG = MG = M5C = M5C = MT = M5C = MT = MG = MG = |
| | | MG = MA = MT = MG = MT = MT = M5C = MT = MT = MT = MG |
| 967 | CO-5234 | MA = MT = MG = MG = M5C = M5C = MT = M5C = MT = |
| | | MG = MG = MG = MA = MT = MG-MT = MT = M5C = MT = MT |
| 968 | CO-5235 | MG = MG = MA = MG = MA = MT = MG = MG = M5C = |
| | | M5C = MT = M5C = MT = MG = MG = MG = MA = MT = MG = MT |
| 969 | CO-5236 | MT = MT = MA = MG-MG = MA = MG = MA = MT = MG = |
| | | MG = M5C = M5C = MT = M5C = MT = MG = MG = MG = MA |
| 970 | CO-5237 | MA = MG = MA = MT = MG = dG = d5C = d5C = dT = |
| | | d5C = dT = dG = dG = dG = dA = MT = MG = MT = MT = M5C |
| 971 | CO-5238 | MA = MG = MA = MT = MG = dG = d5C = d5C = MT = |
| | | d5C = dT = MG = dG = dG = dA = MT = MG = MT = MT = M5C |
| 972 | CO-5239 | MA = MG = MA = MT = MG = LG = d5C = d5C = LT = |
| | | d5C = dT = LG = dG = dG = LA = MT = MG = MT = MT = M5C |
| 973 | CO-5240 | MA = MG = MA = LT = MG = dG = d5C = L5C = dT = |
| | | d5C = dT = LG = dG = dG = dA = LT = MG = MT = MT = M5C |
| 974 | CO-5241 | MA = MG = MA = MT = LG = dG = d5C = d5C = LT = |
| | | d5C = dT = dG = LG = dG = dA = MT = LG = MT = MT = M5C |
| 975 | CO-5242 | MA = MG = MA = MT = MG = LG = M5C = M5C = LT = |
| | | M5C = MT = LG = MG = MG = LA = MT = MG = MT = MT = M5C |
| 976 | CO-5243 | MA = MG = MA = LT = MG = LG = M5C = L5C = MT = |
| | | L5C = MT = LG = MG = LG = MA = LT = MG = LT = MT = M5C |
| 977 | CO-5244 | MA = MG = LA = MT = LG = MG = L5C = M5C = LT = |
| | | M5C = LT = MG = LG = MG = LA = MT = LG = MT = MT = M5C |
| 978 | CO-5245 | MA = MG = LA = MT = MG = LG = M5C = M5C = LT = |
| | | M5C = MT = LG = MG = MG = LA = MT = MG = LT = MT = M5C |
| 979 | CO-5246 | MA = MG = MA = MT = LG = MG = M5C = M5C = LT = |
| | | M5C = MT = MG = LG = MG = MA = MT = LG = MT = MT = M5C |
| 980 | CO-5247 | MA = MG = MA = LT = MG = MG = M5C = L5C = MT = |
| | | M5C = MT = LG = MG = MG = MA = LT = MG = MT = MT = M5C |
| 981 | CO-5248 | MA = MG = MA = MT = MG = LG = M5C = M5C = MT = |
| | | M5C = LT = MG = MG = MG = MA = LT = MG = MT = MT = M5C |
| 982 | CO-5249 | MA = MG = MA = MT = LG = MG = M5C = M5C = MT = |
| | | L5C = MT = MG = MG = MG = LA = MT = MG = MT = MT = M5C |
| 983 | CO-5250 | MG = MA = MG = MA = MT = MG = dG = d5C = d5C = |
| | | dT = d5C = dT = dG = dG = dG = dA = MT = MG = MT = MT = M5C = MT |
| 984 | CO-5251 | MG = MA = MG = MA = MT = MG = MG = M5C = M5C = MT = |
| | | M5C = MT = MG = MG = MG = MA = MT = MG = MT = MT = M5C = MT |
| 985 | CO-5252 | MG = MA = MG = MA = MT = dG = dG = d5C = M5C = dT = |
| | | d5C = dT = dG = MG = dG = dA = dT = MG = MT = MT = M5C = MT |
| 986 | CO-5253 | MG = MA = MG = MA = MT = LG = dG = d5C = L5C = dT = |
| | | d5C = dT = dG = LG = dG = dA = LT = MG = MT = MT = M5C = MT |
| 987 | CO-5254 | MG = MG = MA = MG = MA = MT = MG = dG = d5C = d5C = |
| | | dT = d5C = dT = dG = dG = dG = dA = MT = MG = MT = MT = M5C = MT = MT |
| 988 | CO-5255 | MG = MG = MA = MG = MA = MT = MG = MG = M5C = M5C = |
| | | MT = M5C = MT = MG = MG = MG = MA = MT = MG = MT = MT = M5C = |
| | | MT = MT |
| 989 | CO-5256 | MG = MG = MA = MG = MA = dT = dG = MG = d5C = d5C = MT = |
| | | d5C = dT = MG = dG = dG = MA = dT = dG = MT = MT = M5C = MT = MT |
| 990 | CO-5257 | MG = MG = MA = MG = MA = dT = dG = LG = d5C = d5C = LT = |
| | | d5C = dT = LG = dG = dG = LA = dT = dG = MT = MT = M5C = MT = MT |
| 573 | CO-5290 | MG = MT = MT-M5C-MT-M5C-M5C-M5C-MT- |
| | | MA-MG-M5C-MT-MG-MT-MG-MT = MA = MG = MT |
| 574 | CO-5291 | MG = MT = MT = M5C = MT-M5C-M5C-M5C-MT- |
| | | MA-MG-M5C-MT-MG-MT-MG-MT = MA = MG = MT |
| 575 | CO-5292 | MG = MT = MT = M5C = MT = M5C = M5C-M5C- |
| | | MT-MA-MG-M5C-MT-MG-MT-MG-MT = MA = MG = MT |
| 576 | CO-5293 | MG = MT = MT = M5C = MT = M5C = M5C = M5C = |
| | | MT-MA-MG-M5C-MT-MG-MT-MG-MT = MA = MG = MT |
| 577 | CO-5294 | MG = MT = MT = M5C = MT = M5C = M5C = M5C = |
| | | MT = MA = MG-M5C-MT-MG-MT-MG-MT = MA = MG = MT |
| 578 | CO-5295 | MG = MT = MT = M5C = MT = M5C = M5C = M5C = |
| | | MT = MA = MG = M5C = MT-MG-MT-MG-MT = MA = MG = MT |
| 579 | CO-5296 | MG = MT = MT-M5C-MT-M5C-M5C-M5C-MT-MA-MG-M5C- |
| | | MT-MG-MT-MG = MT = MA = MG = MT |
| 580 | CO-5297 | MG = MT = MT-M5C-MT-M5C-M5C-M5C-MT-MA-MG- |
| | | M5C-MT-MG = MT = MG = MT = MA = MG = MT |
| 581 | CO-5298 | MG = MT = MT-M5C-MT-M5C-M5C-M5C-MT-MA-MG- |
| | | M5C = MT = MG = MT = MG = MT = MA = MG = MT |
| 582 | CO-5299 | MG = MT = MT-M5C-MT-M5C-M5C-M5C-MT-MA = MG = |
| | | M5C = MT = MG-MT = MG = MT = MA = MG = MT |
| 583 | CO-5300 | MG = MT = MT-M5C-MT-M5C-M5C-M5C = MT = MA = |
| | | MG = M5C = MT = MG = MT = MG = MT = MA = MG = MT |
| 584 | CO-5301 | LG = LT = MT = L5C = LT = M5C = L5C = M5C = LT = |
| | | MA = LG = M5C = LT = MG = LT = MG = LT = MA = LG = LT |
| 585 | CO-5302 | LG = LT = MT = L5C = MT = L5C = M5C = L5C = MT = |
| | | LA = MG = L5C = MT = LG = MT = LG = LT = MA = LG = LT |
| 586 | CO-5303 | M5C = M5C = MT-MG-MA-MA-M5C-MT-MG-MT- |
| | | MA-MT-MG-MG-M5C-MT-MG = MA = M5C = M5C |
| 587 | CO-5304 | M5C = M5C = MT = MG = MA-MA-M5C-MT-MG-MT- |
| | | MA-MT-MG-MG-M5C-MT-MG = MA = M5C = M5C |
| 588 | CO-5305 | M5C = M5C = MT = MG = MA = MA = M5C-MT- |
| | | MG-MT-MA-MT-MG-MG-M5C-MT-MG = MA = M5C = M5C |
| 589 | CO-5306 | M5C = M5C = MT = MG = MA = MA = M5C = MT = |
| | | MG-MT-MA-MT-MG-MG-M5C-MT-MG = MA = M5C = M5C |
| 590 | CO-5307 | M5C = M5C = MT = MG = MA = MA = M5C = MT = |
| | | MG = MT = MA-MT-MG-MG-M5C-MT-MG = MA = M5C = M5C |
| 591 | CO-5308 | M5C = M5C = MT = MG = MA = MA = M5C = MT = |
| | | MG = MT = MA = MT = MG-MG-M5C-MT-MG = MA = M5C = M5C |
| 592 | CO-5309 | M5C = M5C = MT-MG-MA-MA-M5C-MT-MG-MT- |
| | | MA-MT-MG-MG-M5C-MT = MG = MA = M5C = M5C |
| 593 | CO-5310 | M5C = M5C = MT-MG-MA-MA-M5C-MT-MG-MT-MA- |
| | | MT-MG-MG = M5C = MT = MG = MA = M5C = M5C |
| 594 | CO-5311 | M5C = M5C = MT-MG-MA-MA-M5C-MT-MG-MT-MA- |
| | | MT = MG = MG = M5C = MT = MG = MA = M5C = M5C |
| 595 | CO-5312 | M5C = M5C = MT-MG-MA-MA-M5C-MT-MG-MT = MA = |
| | | MT = MG = MG = M5C = MT = MG = MA = M5C = M5C |
| 596 | CO-5313 | M5C = M5C = MT-MG-MA-MA-M5C-MT = MG = MT = |
| | | MA = MT = MG = MG = M5C = MT = MG = MA = M5C = M5C |
| 597 | CO-5314 | L5C = L5C = MT = LG = LA = MA = L5C = MT = LG = |
| | | MT = LA = MT = LG = MG = L5C = MT = LG = MA = L5C = L5C |
| 598 | CO-5315 | L5C = L5C = MT = LG = MA = LA = M5C = LT = MG = |
| | | LT = MA = LT = MG = LG = M5C = LT = LG = MA = L5C = L5C |
| 627 | CO-6348 | M5C = M5C = M5C = MG = MA = M5C = MG = M5C = |
| | | MA = MG = MG = MT = MA = MG = MG = MA = MG = MG = MA = M5C |
| 628 | CO-6349 | MG = MG = MA = M5C = M5C = M5C = M5C = MG = MA = |
| | | M5C = MG = M5C = MA = MG = MG = MT = MA = MG = MG = MA |
| 629 | CO-6350 | M5C = MT = M5C = M5C = M5C = MA = MG = MG = MG = |
| | | MA = MG = M5C = M5C = M5C = MG = MG = MA = M5C = M5C = M5C |
| 630 | CO-6351 | M5C = MG = M5C = M5C = MA = MG = MA = MT = MG = |
| | | M5C = M5C = MT = M5C = M5C = M5C = MA = MG = MG = MG = MA |
| 631 | CO-6352 | MA = M5C = M5C = MG = M5C = M5C = MA = MG = MA = |
| | | MT = MG = M5C = M5C = MT = M5C = M5C = M5C = MA = MG = MG |
| 632 | CO-6353 | MT = MG = MA = M5C = M5C = MG = M5C = M5C = MA = |
| | | MG = MA = MT = MG = M5C = M5C = MT = M5C = M5C = M5C = MA |
| 633 | CO-6354 | MG = MA = MG = M5C = MT = dG = dA = d5C = d5C = dG = |
| | | d5C = d5C = dA = dG = dA = MT = MG = M5C = M5C = MT |
| 634 | CO-6355 | MG = MG = MA = MG = M5C = MT = MG = MA = M5C = |
| | | M5C = MG = M5C = M5C = MA = MG = MA = MT = MG = M5C = M5C |
| 635 | CO-6356 | MA = MG = MT = M5C = M5C = MT = MG = MG = MA = |
| | | MG = M5C = MT = MG = MA = M5C = M5C = MG = M5C = M5C = MA |
| 636 | CO-6357 | M5C = MT = MA = MG = MT = M5C = M5C = MT = MG = |
| | | MG = MA = MG = M5C = MT = MG = MA = M5C = M5C = MG = M5C |
| 637 | CO-6358 | M5C = M5C = M5C = MT = MA = MG = MT = M5C = M5C = |
| | | MT = MG = MG = MA = MG = M5C = MT = MG = MA = M5C = M5C |
| 638 | CO-6359 | MG = MG = M5C = M5C = MA = MA = MG = M5C = M5C = |
| | | M5C = MT = MA = MG = MT = M5C = M5C = MT = MG = MG = MA |
| 639 | CO-6360 | MG = MA = MG = M5C = MT = dG = dA = d5C = M5C = |
| | | dG = d5C = M5C = dA = dG = dA = MT = MG = M5C = M5C = MT |
| 640 | CO-6361 | MG = MA = MG = M5C = MT = LG = dA = d5C = L5C = |
| | | dG = d5C = L5C = dA = dG = LA = MT = MG = M5C = M5C = MT |
| 641 | CO-6362 | MG = MA = MG = L5C = MT = dG = dA = L5C = d5C = |
| | | dG = d5C = L5C = dA = dG = dA = LT = MG = M5C = M5C = MT |
| 642 | CO-6363 | MG = MA = MG = M5C = LT = dG = dA = d5C = L5C = |
| | | dG = d5C = d5C = LA = dG = dA = MT = LG = M5C = M5C = MT |
| 643 | CO-6364 | MG = MA = MG = M5C = MT = LG = MA = M5C = L5C = |
| | | MG = M5C = L5C = MA = MG = LA = MT = MG = M5C = M5C = MT |
| 644 | CO-6365 | MG = MA = MG = L5C = MT = LG = MA = L5C = M5C = |
| | | LG = M5C = L5C = MA = LG = MA = LT = MG = L5C = M5C = MT |
| 645 | CO-6366 | MG = MA = LG = M5C = LT = MG = LA = M5C = L5C = |
| | | MG = L5C = M5C = LA = MG = LA = MT = LG = M5C = M5C = MT |
| 646 | CO-6367 | MG = MA = LG = M5C = MT = LG = MA = M5C = L5C = |
| | | MG = M5C = L5C = MA = MG = LA = MT = MG = L5C = M5C = MT |
| 647 | CO-6368 | MG = MA = MG = M5C = LT = MG = MA = M5C = L5C = |
| | | MG = M5C = M5C = LA = MG = MA = MT = LG = M5C = M5C = MT |
| 648 | CO-6369 | MG = MA = MG = L5C = MT = MG = MA = L5C = M5C = |
| | | MG = M5C = L5C = MA = MG = MA = LT = MG = M5C = M5C = MT |
| 649 | CO-6370 | MG = MA = MG = M5C = MT = LG = MA = M5C = M5C = |
| | | MG = L5C = M5C = MA = MG = MA = LT = MG = M5C = M5C = MT |
| 650 | CO-6371 | MG = MA = MG = M5C = LT = MG = MA = M5C = M5C = |
| | | LG = M5C = M5C = MA = MG = LA = MT = MG = M5C = M5C = MT |
| 651 | CO-6372 | MG = MG = MA = MG = M5C = MT = dG = dA = d5C = |
| | | d5C = dG = d5C = d5C = dA = dG = dA = MT = MG = M5C = M5C = MT = M5C |
| 652 | CO-6373 | MG = MG = MA = MG = M5C = MT = MG = MA = M5C = |
| | | M5C = MG = M5C = M5C = MA = MG = MA = MT = MG = M5C = M5C = MT = |
| | | M5C |
| 653 | CO-6374 | MG = MG = MA = MG = M5C = dT = dG = dA = M5C = |
| | | d5C = dG = d5C = d5C = MA = dG = dA = dT = MG = |
| | | M5C = M5C = MT = M5C |
| 654 | CO-6375 | MG = MG = MA = MG = M5C = LT = dG = dA = L5C = |
| | | d5C = dG = d5C = d5C = LA = dG = dA = LT = MG = M5C = M5C = MT = M5C |
| 655 | CO-6376 | MT = MG = MG = MA = MG = M5C = MT = dG = dA = d5C = |
| | | d5C = dG = d5C = d5C = dA = dG = dA = MT = MG = M5C = M5C = MT = M5C = |
| | | M5C |
| 656 | CO-6377 | MT = MG = MG = MA = MG = M5C = MT = MG = MA = |
| | | M5C = M5C = MG = M5C = M5C = MA = MG = MA = MT = MG = M5C = M5C = |
| | | MT = M5C = M5C |
| 657 | CO-6378 | MT = MG = MG = MA = MG = d5C = dT = MG = dA = d5C = |
| | | M5C = dG = d5C = M5C = dA = dG = MA = dT = dG = M5C = M5C = MT = M5C = |
| | | M5C |
| 658 | CO-6379 | MT = MG = MG = MA = MG = d5C = dT = LG = dA = d5C = L5C = |
| | | dG = d5C = L5C = dA = dG = LA = dT = dG = M5C = M5C = MT = M5C = M5C |
| 659 | CO-6456 | MG = MG = MA = M5C = M5C = MA = MA = MA = M5C = |
| | | MT = MA = MG = MA = M5C = M5C = M5C = M5C = MA = MT = MT |
| 660 | CO-6457 | MT = MG = MG = MA = MT = MA = M5C = M5C = M5C = |
| | | MA = MG = MG = MT = MA = M5C = MA = MG = MG = MA = M5C |
| 661 | CO-6458 | MT = MG = MA = M5C = M5C = MA = MA = MG = M5C = |
| | | MT = MG = M5C = M5C = MT = MG = MG = MA = MT = MA = M5C |
| 662 | CO-6459 | MA = M5C = MT = MA = M5C = MA = M5C = M5C = MA = |
| | | M5C = MG = MG = MA = MT = M5C = MT = M5C = M5C = MT = MG |
| 663 | CO-6460 | MT = MG = M5C = M5C = MT = MA = MT = M5C = M5C = |
| | | MA = MA = MG = MA = MA = M5C = MT = MA = M5C = MA = M5C |
| 664 | CO-6461 | MG = MA = MT = M5C = M5C = MA = MG = MA = MG = |
| | | MT = MA = MA = MG = MT = MG = M5C = M5C = MT = MA = MT |
| 665 | CO-6462 | MG = MT = MA = MT = MG = MT = MG = MA = M5C = |
| | | M5C = MT = MG = MA = MT = M5C = M5C = MA = MG = MA = MG |
| 666 | CO-6463 | MT = MG = M5C = M5C = M5C = M5C = M5C = MA = MG = |
| | | MG = MA = M5C = MA = M5C = MT = MG = MT = MA = MT = MG |
| 667 | CO-6464 | MA = MT = M5C = MT = MG = M5C = MT = MG = MT = |
| | | MT = M5C = M5C = MG = MA = M5C = M5C = MA = M5C = M5C = MT |
| 668 | CO-6465 | MA = MA = M5C = M5C = MT = MA = MG = MG = M5C = |
| | | M5C = MA = MT = M5C = MT = MG = M5C = MT = MG = MT = MT |
| 669 | CO-6466 | MT = MA = M5C = MT = MT = MG = MT = M5C = M5C = |
| | | M5C = MA = MA = M5C = M5C = MT = MA = MG = MG = M5C = M5C |
| 670 | CO-6467 | MT = MG = MG = MA = MG = MT = MT = M5C = MA = |
| | | MG = MA = MG = MA = M5C = MT = MT = MA = MT = MA = M5C |
| 671 | CO-6468 | MT = MG = MT = M5C = M5C = MT = M5C = MA = M5C = |
| | | MT = MA = M5C = MT = MG = MG = MA = MG = MT = MT = M5C |
| 672 | CO-6469 | MA = MT = M5C = MA = MG = M5C = M5C = MT = MG = |
| | | MG = M5C = MT = M5C = MG = M5C = MT = M5C = M5C = M5C = MT |
| 673 | CO-6470 | MA = MG = MT = MG = MT = MA = M5C = MG = M5C = |
| | | MT = MA = MT = M5C = MA = MG = M5C = M5C = MT = MG = MG |
| 674 | CO-6471 | M5C = MG = MG = MT = MT = MT = MG = MA = MA = |
| | | MA = MT = MA = MG = MT = MG = MT = MA = M5C = MG = M5C |
| 675 | CO-6472 | MG = M5C = MT = M5C = MA = MT = MG = M5C = MT = |
| | | MG = M5C = M5C = M5C = M5C = M5C = MT = MA = MG = MT = MG |
| 676 | CO-6473 | M5C = MT = MG = MA = MT = M5C = M5C = M5C = MT = |
| | | MG = MA = MG = MA = MG = M5C = MT = M5C = MT = MA = MA |
| 677 | CO-6474 | MT = M5C = MT = MT = MA = M5C = MA = MA = MG = |
| | | MG = MA = MG = MG = M5C = MT = M5C = M5C = MA = MA = MG |
| 678 | CO-6475 | MG = M5C = M5C = M5C = MA = MT = MA = MT = MA = |
| | | MT = MA = MG = MT = M5C = MT = MT = MA = M5C = MA = MA |
| 679 | CO-6476 | MG = MG = MA = MT = MT = M5C = M5C = M5C = M5C = |
| | | MT = MG = MA = MG = M5C = M5C = M5C = MA = MT = MA = MT |
| 680 | CO-6477 | MG = MT = MG = MA = MA = MT = MG = MG = M5C = MT = |
| | | MG = MG = MA = MT = MT = M5C = M5C = M5C = M5C = MT |
| 681 | CO-6478 | M5C = M5C = M5C = MA = MA = MT = MG = MT = MG = |
| | | MA = MG = MT = MG = MA = MA = MT = MG = MG = M5C = MT |
| 682 | CO-6479 | MG = M5C = MT = MG = M5C = MT = MG = MT = M5C = |
| | | M5C = MA = MA = MT = MG = M5C = M5C = M5C = MA = MA = MT |
| 683 | CO-6480 | M5C = M5C = MA = M5C = MT = MG = MG = MG = MA = |
| | | MA = MG = MT = MA = MT = MG = MG = M5C = MT = MG = M5C |
| 684 | CO-6481 | MT = MG = M5C = MT = MG = MT = MG = MA = MG = |
| | | M5C = MT = MA = M5C = M5C = M5C = MA = M5C = MT = MG = MG |
| 685 | CO-6482 | MT = MG = MA = MT = MT = M5C = MT = MA = M5C = |
| | | M5C = MT = MG = M5C = MT = MG = MT = MG = MA = MG = M5C |
| 686 | CO-6483 | MA = MG = MT = MG = MT = M5C = M5C = M5C = MG = |
| | | MA = MT = MG = MA = MT = MT = M5C = MT = MA = M5C = M5C |
| 687 | CO-6484 | MG = MT = M5C = MG = MT = MG = MT = MG = M5C = |
| | | M5C = M5C = MT = MG = MA = MT = MG = M5C = MT = MA = MA |
| 688 | CO-6485 | MG = M5C = M5C = MT = MT = MT = MT = MT = M5C = |
| | | MT = MG = MT = M5C = MG = MT = MG = MT = MG = M5C = M5C |
| 689 | CO-6486 | MT = MG = M5C = MT = M5C = MT = MT = MT = M5C = |
| | | MA = MG = MT = MG = MT = M5C = MT = MT = MT = MG = M5C |
| 690 | CO-6487 | MA = M5C = MA = MT = MG = M5C = M5C = MT = M5C = |
| | | MA = MT = MT = MG = M5C = MT = M5C = MT = MT = MT = M5C |
| 4916 | CO-6531 | mG = MU = MU = MC = MU = MC = MC = MC = MU = |
| | | MA = MG = MC = MU = MG = MU = MG = MU = MA = MG = MU |
| 692 | CO-6532 | mG = MU = MU-MC-MU-MC-MC-MC-MU-MA-MG-MC = |
| | | MU = MG = MU = MG = MU = MA = MG = MU |
| 693 | CO-6533 | mG = MU = MU-MC-MU-MC-MC-MC-MU-MA = MG = |
| | | MC = MU = MG = MU = MG = MU = MA = MG = MU |
| 694 | CO-6545 | MA = M5C = M5C = MA = MG = LG = MG = M5C = LG = |
| | | MT = MG = LA = MT = MG = LG = M5C = MT = MG = MA = MG |
| 695 | CO-6546 | MA = MG = MG = MA = M5C = L5C = MA = MG = LG = |
| | | MG = M5C = LG = MT = MG = LA = MT = MG = MG = M5C = MT |
| 696 | CO-6547 | MG = MG = MA = M5C = M5C = LA = MG = MG = LG = |
| | | M5C = MG = LT = MG = MA = LT = MG = MG = M5C = MT = MG |
| 697 | CO-6548 | MG = MA = M5C = M5C = MA = LG = MG = MG = L5C = |
| | | MG = MT = LG = MA = MT = LG = MG = M5C = MT = MG = MA |
| 698 | CO-7388 | MG = MG = M5C = M5C = MA = dA = dG = d5C = d5C = |
| | | d5C = dT = dA = dG = dT = d5C = M5C = MT = MG = MG = MA |
| 699 | CO-7389 | MG = MG = M5C = M5C = MA = dA = dG = d5C = M5C = |
| | | d5C = dT = MA = dG = dT = d5C = M5C = MT = MG = MG = MA |
| 700 | CO-7390 | MG = MG = M5C = M5C = MA = LA = dG = d5C = L5C = |
| | | d5C = dT = LA = dG = dT = L5C = M5C = MT = MG = MG = MA |
| 701 | CO-7391 | MG = MG = M5C = L5C = MA = dA = dG = L5C = d5C = |
| | | d5C = dT = LA = dG = dT = d5C = L5C = MT = MG = MG = MA |
| 702 | CO-7392 | MG = MG = M5C = M5C = LA = dA = dG = d5C = L5C = |
| | | d5C = dT = dA = LG = dT = d5C = M5C = LT = MG = MG = MA |
| 703 | CO-7393 | MG = MG = M5C = M5C = MA = LA = MG = M5C = L5C = |
| | | M5C = MT = LA = MG = MT = L5C = M5C = MT = MG = MG = MA |
| 704 | CO-7394 | MG = MG = M5C = L5C = MA = LA = MG = L5C = M5C = |
| | | L5C = MT = LA = MG = LT = M5C = L5C = MT = LG = MG = MA |
| 705 | CO-7395 | MG = MG = L5C = M5C = LA = MA = LG = M5C = L5C = |
| | | M5C = LT = MA = LG = MT = L5C = M5C = LT = MG = MG = MA |
| 706 | CO-7396 | MG = MG = L5C = M5C = MA = LA = MG = M5C = L5C = |
| | | M5C = MT = LA = MG = MT = L5C = M5C = MT = LG = MG = MA |
| 707 | CO-7397 | MG = MG = M5C = M5C = LA = MA = MG = M5C = L5C = |
| | | M5C = MT = MA = LG = MT = M5C = M5C = LT = MG = MG = MA |
| 708 | CO-7398 | MG = MG = M5C = L5C = MA = MA = MG = L5C = M5C = |
| | | M5C = MT = LA = MG = MT = M5C = L5C = MT = MG = MG = MA |
| 709 | CO-7399 | MG = MG = M5C = M5C = MA = LA = MG = M5C = M5C = |
| | | M5C = LT = MA = MG = MT = M5C = L5C = MT = MG = MG = MA |
| 710 | CO-7400 | MG = MG = M5C = M5C = LA = MA = MG = M5C = M5C = |
| | | L5C = MT = MA = MG = MT = L5C = M5C = MT = MG = MG = MA |
| 711 | CO-7401 | M5C = MG = MG = M5C = M5C = MA = dA = dG = d5C = |
| | | d5C = d5C = dT = dA = dG = dT = d5C = M5C = MT = MG = MG = MA = MG |
| 712 | CO-7402 | M5C = MG = MG = M5C = M5C = MA = MA = MG = M5C = |
| | | M5C = M5C = MT = MA = MG = MT = M5C = M5C = MT = MG = MG = MA = |
| | | MG |
| 713 | CO-7403 | M5C = MG = MG = M5C = M5C = dA = dA = dG = M5C = |
| | | d5C = d5C = dT = dA = MG = dT = d5C = d5C = MT = MG = MG = MA = MG |
| 714 | CO-7404 | M5C = MG = MG = M5C = M5C = LA = dA = dG = L5C = |
| | | d5C = d5C = dT = dA = LG = dT = d5C = L5C = MT = MG = MG = MA = MG |
| 715 | CO-7405 | M5C = MG = MG = M5C = M5C = LA = MA = MG = L5C = |
| | | M5C = M5C = MT = MA = LG = MT = M5C = L5C = MT = MG = MG = |
| | | MA = MG |
| 716 | CO-7406 | MG = M5C = MG = MG = M5C = M5C = MA = dA = dG = |
| | | d5C = d5C = d5C = dT = dA = dG = dT = d5C = M5C = MT = MG = MG = |
| | | MA = MG = M5C |
| 717 | CO-7407 | MG = M5C = MG = MG = M5C = M5C = MA = MA = MG = |
| | | M5C = M5C = M5C = MT = MA = MG = MT = M5C = M5C = MT = MG = MG = |
| | | MA = MG = M5C |
| 718 | CO-7408 | MG = M5C = MG = MG = M5C = d5C = dA = MA = dG = d5C = |
| | | M5C = d5C = dT = MA = dG = dT = M5C = d5C = dT = MG = MG = MA = MG = |
| | | M5C |
| 719 | CO-7409 | MG = M5C = MG = MG = M5C = d5C = dA = LA = dG = d5C = |
| | | L5C = d5C = dT = LA = dG = dT = L5C = d5C = dT = MG = MG = MA = |
| | | MG = M5C |
| 720 | CO-7410 | MG = M5C = MG = MG = M5C = M5C = MA = LA = MG = |
| | | M5C = L5C = M5C = MT = LA = MG = MT = L5C = M5C = MT = MG = |
| | | MG = MA = MG = M5C |
| 721 | CO-7411 | MG = MG = MA = MG = MA = MT = MG = LG = M5C = |
| | | M5C = LT = M5C = MT = LG = MG = MG = LA = MT = MG = MT = MT = |
| | | M5C = MT = MT |
| 722 | CO-7412 | MG = MG = MA = MG-MA-MT = MG = LG = M5C = M5C = |
| | | LT = M5C = MT = LG = MG = MG = LA = MT = MG-MT- |
| | | MT = M5C = MT = MT |
| 723 | CO-7413 | MG = MG = MA-MG-MA-MT = MG = LG = M5C = M5C = |
| | | LT = M5C = MT = LG = MG = MG = LA = MT = MG-MT-MT- |
| | | M5C = MT = MT |
| 724 | CO-7414 | MG = MG-MA-MG-MA-MT = MG = LG = M5C = M5C = |
| | | LT = M5C = MT = LG = MG = MG = LA = MT = MG-MT-MT-M5C- |
| | | MT = MT |
| 725 | CO-7415 | MG = MG = MA = MG = MA = MT = MG-LG-M5C-M5C-LT- |
| | | M5C-MT-LG-MG-MG-LA-MT-MG = MT = MT = M5C = MT = MT |
| 726 | CO-7416 | MG = MG = MA = MG = MA = LT = MG = MG = L5C = |
| | | M5C = MT = L5C = MT = MG = LG-MG-MA = LT = MG = MT = MT = |
| | | M5C = MT = MT |
| 727 | CO-7417 | MG = MG = MA = MG-MA-LT = MG = MG = L5C = |
| | | M5C = MT = L5C = MT = MG = LG = MG = MA = LT = MG-MT- |
| | | MT = M5C = MT = MT |
| 728 | CO-7418 | MG = MG = MA-MG-MA-LT = MG = MG = L5C = M5C = |
| | | MT = L5C = MT = MG = LG = MG = MA = LT = MG-MT-MT- |
| | | M5C = MT = MT |
| 729 | CO-7419 | MG = MG-MA-MG-MA-LT = MG = MG = L5C = M5C = |
| | | MT = L5C = MT = MG = LG = MG = MA = LT = MG-MT-MT-M5C- |
| | | MT = MT |
| 730 | CO-7420 | MG = MG = MA = MG = MA = LT = MG-MG-L5C-M5C-MT- |
| | | L5C-MT-MG-LG-MG-MA-LT-MG = MT = MT = M5C = MT = MT |
| 731 | CO-7421 | MG = MG = MA = MG = MA = MT = LG = MG = M5C = |
| | | L5C = MT = M5C = LT = MG = MG = LG = MA = MT = LG = MT = |
| | | MT = M5C = MT = MT |
| 732 | CO-7422 | MG = MG = MA = MG-MA-MT = LG = MG = M5C = |
| | | L5C = MT = M5C = LT = MG = MG = LG = MA = MT = LG-MT- |
| | | MT = M5C = MT = MT |
| 733 | CO-7423 | MG = MG = MA-MG-MA-MT = LG = MG = M5C = L5C = |
| | | MT = M5C = LT = MG = MG = LG = MA = MT = LG-MT-MT- |
| | | M5C = MT = MT |
| 734 | CO-7424 | MG = MG-MA-MG-MA-MT = LG = MG = M5C = L5C = |
| | | MT = M5C = LT = MG = MG = LG = MA = MT = LG-MT-MT-M5C- |
| | | MT = MT |
| 735 | CO-7425 | MG = MG = MA = MG = MA = MT = LG-MG-M5C-L5C-MT- |
| | | M5C-LT-MG-MG-LG-MA-MT-LG = MT = MT = M5C = MT = MT |
| 736 | CO-8051 | MT = MG = MG = M5C = MA = d5C = dT = dT = dG = |
| | | d5C = dA = dA = d5C = d5C = d5C = MT = M5C = M5C = MT = MA |
| 737 | CO-8052 | MG = MG = M5C = MA = MG = dA = dT = d5C = d5C = |
| | | dT = dT = d5C = dT = dA = dT = MG = MT = MA = MG = M5C |
| 738 | CO-8053 | MG = MG = MG = MA = MT = dG = dT = dT = d5C = |
| | | dT = dT = dT = dG = dA = dA = MT = MT = MA = MG = MG |
| 739 | CO-8054 | M5C = M5C = MG = MT = MT = dG = dA = dG = dA = |
| | | dG = dG = dA = dA = d5C = dT = MG = MG = MG = MT = M5C |
| 740 | CO-8055 | MG = MT = MG = MT = MA = dG = dT = dG = dT = |
| | | dA = dG = dA = dG = dG = dT = MG = MG = M5C = M5C = MA |
| 741 | CO-8056 | MA = MA = MG = MG = M5C = dT = d5C = d5C = dA = |
| | | dG = dT = dT = d5C = dT = d5C = M5C = M5C = MT = MA = MG |
| 742 | CO-8057 | MT = MA = MG = MT = MG = dG = dA = dA = dG = |
| | | dA = dT = dG = dT = d5C = dG = MG = MA = MG = M5C = MT |
| 743 | CO-8058 | M5C = MA = MT = MT = MT = d5C = d5C = d5C = d5C = |
| | | dT = d5C = dG = dA = d5C = dA = M5C = MT = M5C = MA = MG |
| 744 | CO-8059 | M5C = MA = MT = M5C = MT = dG = dG = dA = dT = |
| | | dT = dG = dG = d5C = dT = d5C = MA = M5C = M5C = MT = MT |
| 745 | CO-8060 | MA = M5C = MT = MT = MT = dT = d5C = d5C = d5C = |
| | | d5C = d5C = dG = d5C = dT = dG = M5C = M5C = MT = M5C = MT |
| 746 | CO-8061 | MG = MG = M5C = MG = MT = dG = dA = dT = dG = |
| | | dG = d5C = dT = dG = dA = dG = MT = M5C = M5C = M5C = MT |
| 747 | CO-8062 | M5C = MT = M5C = MT = MT = dT = d5C = dG = dG = |
| | | dA = d5C = dG = d5C = dT = dG = M5C = MA = MA = MG = MT |
| 748 | CO-8063 | MG = MT = M5C = MT = M5C = d5C = dA = dG = dG = |
| | | dT = d5C = d5C = dG = dG = d5C = MT = M5C = MT = MT = MT |
| 749 | CO-8064 | MG = M5C = MT = M5C = M5C = dT = d5C = dT = d5C = |
| | | dT = dT = dG = dT = d5C = d5C = MG = MT = MA = M5C = MT |
| 750 | CO-8065 | MT = MT = M5C = MT = M5C = dT = dT = dG = d5C = |
| | | d5C = d5C = dA = dG = d5C = dA = MT = MG = MT = M5C = MG |
| 751 | CO-8066 | MG = MT = MA = MG = MA = dG = dA = d5C = dA = |
| | | d5C = d5C = dT = d5C = d5C = d5C = M5C = MG = M5C = MA = M5C |
| 752 | CO-8067 | M5C = MT = MG = MA = MT = dG = d5C = dA = d5C = |
| | | dT = dA = dA = d5C = dG = dA = MG = MG = MT = MT = MG |
| 753 | CO-8068 | MA = M5C = MA = MA = MT = d5C = dT = d5C = d5C = |
| | | d5C = d5C = dG = dG = d5C = dT = MA = M5C = MT = MG = MT |
| 754 | CO-8069 | MG = MA = MA = MG = M5C = d5C = d5C = dT = dG = |
| | | dG = dA = dT = d5C = dT = d5C = M5C = MG = MA = MG = M5C |
| 755 | CO-8070 | M5C = M5C = M5C = MG = M5C = d5C = dT = d5C = dT = |
| | | dA = d5C = dG = dT = dA = dG = MA = M5C = MA = MA = MG |
| 756 | CO-8071 | MG = MG = MA = MG = MG = dA = dA = dT = dG = dT = |
| | | dG = dA = dA = d5C = dT = MG = MA = MG = MT = MA |
| 757 | CO-8072 | M5C = MT = MG = M5C = MA = dA = d5C = dA = d5C = |
| | | dT = d5C = dT = dG = d5C = d5C = MG = M5C = M5C = MA = MG |
| 758 | CO-8073 | M5C = M5C = MT = M5C = M5C = dA = dG = dT = dA = |
| | | dA = dA = d5C = dG = dA = d5C = M5C = MT = MT = MG = MA |
| 759 | CO-8074 | MA = MA = MG = MT = M5C = d5C = d5C = dG = dA = |
| | | dT = d5C = d5C = dA = dG = dA = MA = MG = M5C = MA = MG |
| 760 | CO-8075 | MT = M5C = MT = MG = M5C = d5C = dA = dG = dG = |
| | | d5C = dG = dT = dG = dA = dA = MG = MA = MG = MA = M5C |
| 761 | CO-8076 | MA = MT = M5C = MT = MT = d5C = d5C = dA = dA = |
| | | d5C = dT = dG = dG = dT = dT = MT = M5C = MG = MA = MG |
| 762 | CO-8077 | MT = MA = MG = MT = M5C = dT = dA = dA = dG = |
| | | d5C = d5C = dA = d5C = dT = d5C = MT = M5C = M5C = M5C = M5C |
| 763 | CO-8078 | MA = M5C = MA = MT = M5C = dT = dA = d5C = dA = |
| | | dG = dT = dG = d5C = d5C = d5C = MG = MG = MT = MA = M5C |
| 764 | CO-8079 | MT = M5C = MT = MT = M5C = d5C = d5C = d5C = d5C = |
| | | d5C = dA = dG = dT = dT = dT = MG = MA = MG = M5C = M5C |
| 765 | CO-8080 | MG = M5C = MA = MG = MT = dG = d5C = dT = dA = |
| | | dT = d5C = dA = dA = dT = dA = MT = MG = MG = MA = MT |
| 766 | CO-8081 | MT = MG = MT = M5C = M5C = d5C = dA = d5C = d5C = |
| | | dT = dT = dA = dT = d5C = dA = MG = M5C = M5C = MT = M5C |
| 767 | CO-8082 | M5C = M5C = M5C = MT = MT = dG = d5C = dT = dA = |
| | | dG = dA = dG = dG = d5C = dT = MG = MT = M5C = MT = MG |
| 768 | CO-8083 | MG = M5C = M5C = M5C = MT = dT = dA = dT = d5C = |
| | | dT = dT = dG = dA = dA = d5C = MG = MT = MG = MG = M5C |
| 769 | CO-8084 | MT = M5C = M5C = MA = MT = d5C = dT = d5C = dG = |
| | | dA = d5C = dA = dG = d5C = d5C = MA = M5C = M5C = MA = MG |
| 770 | CO-8085 | M5C = M5C = MA = MT = MG = dG = dT = d5C = dT = |
| | | d5C = dT = dA = dT = dT = d5C = MA = M5C = M5C = M5C = MA |
| 771 | CO-8086 | MA = M5C = MT = MG = MT = d5C = d5C = dT = dG = |
| | | dA = dA = d5C = dT = dG = dT = MA = MT = MG = MG = M5C |
| 772 | CO-8087 | M5C = MG = MG = MA = MA = dT = dT = d5C = d5C = |
| | | dA = d5C = dA = dA = d5C = d5C = M5C = MT = MG = M5C = MA |
| 773 | CO-8088 | MG = MA = MT = MG = M5C = dA = d5C = d5C = dA = |
| | | dG = dT = d5C = dT = dT = dA = M5C = MA = M5C = MA = M5C |
| 774 | CO-8089 | MG = MG = MG = MA = M5C = dA = d5C = d5C = dT = |
| | | dG = dT = dA = dT = dG = dA = MA = MT = MG = MT = M5C |
| 775 | CO-8090 | MG = MG = M5C = MT = MG = dT = dG = dT = d5C = |
| | | dT = d5C = dA = d5C = dT = dA = MG = MA = MA = MG = M5C |
| 776 | CO-8091 | MG = MT = MT = M5C = MA = dG = d5C = dA = dG = |
| | | d5C = dA = d5C = d5C = d5C = d5C = MT = MT = M5C = M5C = MT |
| 777 | CO-8092 | MG = MA = MG = MG = MG = dT = dG = dA = dG = |
| | | d5C = dT = dG = d5C = dA = dA = MT = MG = MT = MT = MG |
| 778 | CO-8093 | MG = M5C = MT = MG = MA = dA = dG = d5C = dT = |
| | | d5C = dG = dT = d5C = dT = dG = MG = MA = MA = M5C = MA |
| 779 | CO-8094 | MG = MT = MT = M5C = MT = dG = dT = dG = dT = |
| | | d5C = dA = dG = d5C = dT = dA = MT = M5C = MT = MA = MT |
| 780 | CO-8095 | MT = MT = MG = M5C = MA = dA = dT = d5C = dG = |
| | | dT = dG = dG = d5C = dG = d5C = MT = MT = MG = MG = MG |
| 781 | CO-8096 | M5C = MT = MA = MG = MG = dT = d5C = dT = dA = |
| | | dA = dT = d5C = d5C = d5C = dA = MG = M5C = MA = MG = M5C |
| 782 | CO-8097 | M5C = MA = MG = MT = MT = dG = dG = dT = dA = |
| | | dG = d5C = dA = d5C = dT = dT = MG = MT = MA = MG = M5C |
| 783 | CO-8098 | MA = MT = MT = MT = M5C = d5C = d5C = d5C = dT = |
| | | dT = dG = dA = dG = dG = d5C = MA = MG = MT = MG = M5C |
| 784 | CO-8099 | MA = MG = MT = M5C = MG = dT = dG = dG = dT = |
| | | dT = dT = d5C = dT = dG = dG = MG = MA = MG = MT = M5C |
| 785 | CO-8100 | MG = MG = MG = MT = MG = d5C = dG = d5C = dT = |
| | | dA = dA = dT = dG = d5C = dT = MA = MT = MG = MG = MT |
| 786 | CO-8101 | MG = M5C = M5C = MA = MT = dT = dA = dA = dG = |
| | | d5C = dT = dG = dT = dA = dG = M5C = M5C = M5C = M5C = MA |
| 787 | CO-8102 | M5C = M5C = MA = MG = MA = dA = d5C = d5C = dT = |
| | | d5C = dT = d5C = dG = dT = dG = MT = MT = MA = MG = MA |
| 788 | CO-8103 | MG = MT = MG = MA = MA = dA = dT = dA = dT = |
| | | dG = d5C = dG = d5C = dT = d5C = M5C = M5C = MT = M5C = M5C |
| 789 | CO-8104 | MG = MG = MT = MG = MG = dT = dG = dG = dT = |
| | | dA = dT = dG = dT = dG = dG = M5C = MT = MT = MT = MG |
| 790 | CO-8105 | M5C = MA = MA = MG = MA = dT = dA = dA = dA = |
| | | d5C = dA = dA = dG = dG = dT = MA = MG = MG = MG = MT |
| 791 | CO-8106 | MT = MG = MG = M5C = MA = M5C = MT = MT = MG = |
| | | M5C = MA = MA = M5C = M5C = M5C = MT = M5C = M5C = MT = MA |
| 792 | CO-8107 | MG = MG = M5C = MA = MG = MA = MT = M5C = M5C = |
| | | MT = MT = M5C = MT = MA = MT = MG = MT = MA = MG = M5C |
| 793 | CO-8108 | MG = MG = MG = MA = MT = MG = MT = MT = M5C = |
| | | MT = MT = MT = MG = MA = MA = MT = MT = MA = MG = MG |
| 794 | CO-8109 | M5C = M5C = MG = MT = MT = MG = MA = MG = MA = |
| | | MG = MG = MA = MA = M5C = MT = MG = MG = MG = MT = M5C |
| 795 | CO-8110 | MG = MT = MG = MT = MA = MG = MT = MG = MT = |
| | | MA = MG = MA = MG = MG = MT = MG = MG = M5C = M5C = MA |
| 796 | CO-8111 | MA = MA = MG = MG = M5C = MT = M5C = M5C = MA = |
| | | MG = MT = MT = M5C = MT = M5C = M5C = M5C = MT = MA = MG |
| 797 | CO-8112 | MT = MA = MG = MT = MG = MG = MA = MA = MG = MA = |
| | | MT = MG = MT = M5C = MG = MG = MA = MG = M5C = MT |
| 798 | CO-8113 | M5C = MA = MT = MT = MT = M5C = M5C = M5C = M5C = |
| | | MT = M5C = MG = MA = M5C = MA = M5C = MT = M5C = MA = MG |
| 799 | CO-8114 | M5C = MA = MT = M5C = MT = MG = MG = MA = MT = |
| | | MT = MG = MG = M5C = MT = M5C = MA = M5C = M5C = MT = MT |
| 800 | CO-8115 | MA = M5C = MT = MT = MT = MT = M5C = M5C = M5C = |
| | | M5C = M5C = MG = M5C = MT = MG = M5C = M5C = MT = M5C = MT |
| 801 | CO-8116 | MG = MG = M5C = MG = MT = MG = MA = MT = MG = |
| | | MG = M5C = MT = MG = MA = MG = MT = M5C = M5C = M5C = MT |
| 802 | CO-8117 | M5C = MT = M5C = MT = MT = MT = M5C = MG = MG = |
| | | MA = M5C = MG = M5C = MT = MG = M5C = MA = MA = MG = MT |
| 803 | CO-8118 | MG = MT = M5C = MT = M5C = M5C = MA = MG = MG = |
| | | MT = M5C = M5C = MG = MG = M5C = MT = M5C = MT = MT = MT |
| 804 | CO-8119 | MG = M5C = MT = M5C = M5C = MT = M5C = MT = M5C = |
| | | MT = MT = MG = MT = M5C = M5C = MG = MT = MA = M5C = MT |
| 805 | CO-8120 | MT = MT = M5C = MT = M5C = MT = MT = MG = M5C = |
| | | M5C = M5C = MA = MG = M5C = MA = MT = MG = MT = M5C = MG |
| 806 | CO-8121 | MG = MT = MA = MG = MA = MG = MA = M5C = MA = |
| | | M5C = M5C = MT = M5C = M5C = M5C = M5C = MG = M5C = MA = M5C |
| 807 | CO-8122 | M5C = MT = MG = MA = MT = MG = M5C = MA = M5C = |
| | | MT = MA = MA = M5C = MG = MA = MG = MG = MT = MT = MG |
| 808 | CO-8123 | MA = M5C = MA = MA = MT = M5C = MT = M5C = M5C = |
| | | M5C = M5C = MG = MG = M5C = MT = MA = M5C = MT = MG = MT |
| 809 | CO-8124 | MG = MA = MA = MG = M5C = M5C = M5C = MT = MG = |
| | | MG = MA = MT = M5C = MT = M5C = M5C = MG = MA = MG = M5C |
| 810 | CO-8125 | M5C = M5C = M5C = MG = M5C = M5C = MT = M5C = MT = |
| | | MA = M5C = MG = MT = MA = MG = MA = M5C = MA = MA = MG |
| 811 | CO-8126 | MG = MG = MA = MG = MG = MA = MA = MT = MG = |
| | | MT = MG = MA = MA = M5C = MT = MG = MA = MG = MT = MA |
| 812 | CO-8127 | M5C = MT = MG = M5C = MA = MA = M5C = MA = M5C = |
| | | MT = M5C = MT = MG = M5C = M5C = MG = M5C = M5C = MA = MG |
| 813 | CO-8128 | M5C = M5C = MT = M5C = M5C = MA = MG = MT = MA = |
| | | MA = MA = M5C = MG = MA = M5C = M5C = MT = MT = MG = MA |
| 814 | CO-8129 | MA = MA = MG = MT = M5C = M5C = M5C = MG = MA = |
| | | MT = M5C = M5C = MA = MG = MA = MA = MG = M5C = MA = MG |
| 815 | CO-8130 | MT = M5C = MT = MG = M5C = M5C = MA = MG = MG = |
| | | M5C = MG = MT = MG = MA = MA = MG = MA = MG = MA = M5C |
| 816 | CO-8131 | MA = MT = M5C = MT = MT = M5C = M5C = MA = MA = |
| | | M5C = MT = MG = MG = MT = MT = MT = M5C = MG = MA = MG |
| 817 | CO-8132 | MT = MA = MG = MT = M5C = MT = MA = MA = MG = |
| | | M5C = M5C = MA = M5C = MT = M5C = MT = M5C = M5C = M5C = M5C |
| 818 | CO-8133 | MA = M5C = MA = MT = M5C = MT = MA = M5C = MA = |
| | | MG = MT = MG = M5C = M5C = M5C = MG = MG = MT = MA = M5C |
| 819 | CO-8134 | MT = M5C = MT = MT = M5C = M5C = M5C = M5C = M5C = |
| | | M5C = MA = MG = MT = MT = MT = MG = MA = MG = M5C = M5C |
| 820 | CO-8135 | MG = M5C = MA = MG = MT = MG = M5C = MT = MA = |
| | | MT = M5C = MA = MA = MT = MA = MT = MG = MG = MA = MT |
| 821 | CO-8136 | MT = MG = MT = M5C = M5C = M5C = MA = M5C = M5C = |
| | | MT = MT = MA = MT = M5C = MA = MG = M5C = M5C = MT = M5C |
| 822 | CO-8137 | M5C = M5C = M5C = MT = MT = MG = M5C = MT = MA = |
| | | MG = MA = MG = MG = M5C = MT = MG = MT = M5C = MT = MG |
| 823 | CO-8138 | MG = M5C = M5C = M5C = MT = MT = MA = MT = M5C = |
| | | MT = MT = MG = MA = MA = M5C = MG = MT = MG = MG = M5C |
| 824 | CO-8139 | MT = M5C = M5C = MA = MT = M5C = MT = M5C = MG = |
| | | MA = M5C = MA = MG = M5C = M5C = MA = M5C = M5C = MA = MG |
| 825 | CO-8140 | M5C = M5C = MA = MT = MG = MG = MT = M5C = MT = |
| | | M5C = MT = MA = MT = MT = M5C = MA = M5C = M5C = M5C = MA |
| 826 | CO-8141 | MA = M5C = MT = MG = MT = M5C = M5C = MT = MG = |
| | | MA = MA = M5C = MT = MG = MT = MA = MT = MG = MG = M5C |
| 827 | CO-8142 | M5C = MG = MG = MA = MA = MT = MT = M5C = M5C = |
| | | MA = M5C = MA = MA = M5C = M5C = M5C = MT = MG = M5C = MA |
| 828 | CO-8143 | MG = MA = MT = MG = M5C = MA = M5C = M5C = MA = |
| | | MG = MT = M5C = MT = MT = MA = M5C = MA = M5C = MA = M5C |
| 829 | CO-8144 | MG = MG = MG = MA = M5C = MA = M5C = M5C = MT = |
| | | MG = MT = MA = MT = MG = MA = MA = MT = MG = MT = M5C |
| 830 | CO-8145 | MG = MG = M5C = MT = MG = MT = MG = MT = M5C = |
| | | MT = M5C = MA = M5C = MT = MA = MG = MA = MA = MG = M5C |
| 831 | CO-8146 | MG = MT = MT = M5C = MA = MG = M5C = MA = MG = |
| | | M5C = MA = M5C = M5C = M5C = M5C = MT = MT = M5C = M5C = MT |
| 832 | CO-8147 | MG = MA = MG = MG = MG = MT = MG = MA = MG = |
| | | M5C = MT = MG = M5C = MA = MA = MT = MG = MT = MT = MG |
| 833 | CO-8148 | MG = M5C = MT = MG = MA = MA = MG = M5C = MT = |
| | | M5C = MG = MT = M5C = MT = MG = MG = MA = MA = M5C = MA |
| 834 | CO-8149 | MG = MT = MT = M5C = MT = MG = MT = MG = MT = |
| | | M5C = MA = MG = M5C = MT = MA = MT = M5C = MT = MA = MT |
| 835 | CO-8150 | MT = MT = MG = M5C = MA = MA = MT = M5C = MG = |
| | | MT = MG = MG = M5C = MG = M5C = MT = MT = MG = MG = MG |
| 836 | CO-8151 | M5C = MT = MA = MG = MG = MT = M5C = MT = MA = |
| | | MA = MT = M5C = M5C = M5C = MA = MG = M5C = MA = MG = M5C |
| 837 | CO-8152 | M5C = MA = MG = MT = MT = MG = MG = MT = MA = |
| | | MG = M5C = MA = M5C = MT = MT = MG = MT = MA = MG = M5C |
| 838 | CO-8153 | MA = MT = MT = MT = M5C = M5C = M5C = M5C = MT = |
| | | MT = MG = MA = MG = MG = M5C = MA = MG = MT = MG = M5C |
| 839 | CO-8154 | MA = MG = MT = M5C = MG = MT = MG = MG = MT = |
| | | MT = MT = M5C = MT = MG = MG = MG = MA = MG = MT = M5C |
| 840 | CO-8155 | MG = MG = MG = MT = MG = M5C = MG = M5C = MT = |
| | | MA = MA = MT = MG = M5C = MT = MA = MT = MG = MG = MT |
| 841 | CO-8156 | MG = M5C = M5C = MA = MT = MT = MA = MA = MG = |
| | | M5C = MT = MG = MT = MA = MG = M5C = M5C = M5C = M5C = MA |
| 842 | CO-8157 | M5C = M5C = MA = MG = MA = MA = M5C = M5C = MT = |
| | | M5C = MT = M5C = MG = MT = MG = MT = MT = MA = MG = MA |
| 843 | CO-8158 | MG = MT = MG = MA = MA = MA = MT = MA = MT = |
| | | MG = M5C = MG = M5C = MT = M5C = M5C = M5C = MT = M5C = M5C |
| 844 | CO-8159 | MG = MG = MT = MG = MG = MT = MG = MG = MT = |
| | | MA = MT = MG = MT = MG = MG = M5C = MT = MT = MT = MG |
| 845 | CO-8160 | M5C = MA = MA = MG = MA = MT = MA = MA = MA = |
| | | M5C = MA = MA = MG = MG = MT = MA = MG = MG = MG = MT |
| 846 | CO-10673 | MG = MT = M5C = MT = M5C = d5C = dA = MG = dG = |
| | | dT = M5C = d5C = dG = MG = d5C = MT = M5C = MT = MT = MT |
| 847 | CO-10674 | MG = MT = L5C = MT = M5C = d5C = dA = dG = dG = |
| | | dT = d5C = d5C = dG = dG = d5C = MT = M5C = LT = MT = MT |
| 848 | CO-10675 | MG = MT = L5C = MT = L5C = d5C = dA = dG = dG = |
| | | dT = d5C = d5C = dG = dG = d5C = LT = M5C = LT = MT = MT |
| 849 | CO-10676 | MG = LT = M5C = LT = M5C = d5C = dA = dG = dG = |
| | | dT = d5C = d5C = dG = dG = d5C = MT = L5C = MT = LT = MT |
| 850 | CO-10677 | MG = LT = M5C = LT = M5C = d5C = dA = MG = |
| | | dG = dT = M5C = d5C = dG = MG = d5C = MT = L5C = MT = LT = MT |
| 851 | CO-10678 | LG = MT = L5C = MT = M5C = d5C = dA = dG = |
| | | dG = dT = d5C = d5C = dG = dG = d5C = MT = M5C = LT = MT = LT |
| 852 | CO-10679 | MG = MT = M5C-MT-M5C = d5C = dA = dG = dG = |
| | | dT = d5C = d5C = dG = dG = d5C = MT-M5C-MT = MT = MT |
| 853 | CO-10680 | MG = MT-M5C-MT-M5C = d5C = dA = dG = dG = |
| | | dT = d5C = d5C = dG = dG = d5C = MT-M5C-MT-MT = MT |
| 854 | CO-10681 | MT = MG = MT = M5C = MT = M5C = d5C = dA = dG = |
| | | dG = dT = d5C = d5C = dG = dG = d5C = MT = M5C = MT = MT = MT = M5C |
| 855 | CO-10683 | M5C = M5C = MG = MG = M5C = dT = d5C = dT = |
| | | dT = dT = d5C = dT = d5C = dT = dT = MT = M5C = MG = MG = MA |
| 856 | CO-10684 | MG = MT = M5C = M5C = MG = dG = d5C = dT = |
| | | d5C = dT = dT = dT = d5C = dT = d5C = MT = MT = MT = M5C = MG |
| 857 | CO-10685 | MA = MG = MG = MT = M5C = d5C = dG = dG = d5C = |
| | | dT = d5C = dT = dT = dT = d5C = MT = M5C = MT = MT = MT |
| 858 | CO-10686 | M5C = M5C = MA = MG = MG = dT = d5C = d5C = dG = |
| | | dG = d5C = dT = d5C = dT = dT = MT = M5C = MT = M5C = MT |
| 859 | CO-10687 | M5C = MT = M5C = M5C = MA = dG = dG = dT = d5C = |
| | | d5C = dG = dG = d5C = dT = d5C = MT = MT = MT = M5C = MT |
| 860 | CO-10688 | MT = MG = MT = M5C = MT = d5C = d5C = dA = dG = |
| | | dG = dT = d5C = d5C = dG = dG = M5C = MT = M5C = MT = MT |
| 861 | CO-10689 | MG = MT = MA = MG = MA = dG = dA = M5C = dA = |
| | | d5C = M5C = dT = d5C = M5C = d5C = M5C = MG = M5C = MA = M5C |
| 862 | CO-10690 | MG = MT = LA = MG = MA = dG = dA = d5C = dA = |
| | | d5C = d5C = dT = d5C = d5C = d5C = M5C = MG = L5C = MA = M5C |
| 863 | CO-10691 | MG = MT = LA = MG = LA = dG = dA = d5C = dA = |
| | | d5C = d5C = dT = d5C = d5C = d5C = L5C = MG = L5C = MA = M5C |
| 864 | CO-10692 | MG = LT = MA = LG = MA = dG = dA = d5C = dA = |
| | | d5C = d5C = dT = d5C = d5C = d5C = M5C = LG = M5C = LA = M5C |
| 865 | CO-10693 | MG = LT = MA = LG = MA = dG = dA = M5C = dA = |
| | | d5C = M5C = dT = d5C = M5C = d5C = M5C = LG = M5C = LA = M5C |
| 866 | CO-10694 | LG = MT = LA = MG = MA = dG = dA = d5C = dA = |
| | | d5C = d5C = dT = d5C = d5C = d5C = M5C = MG = L5C = MA = L5C |
| 867 | CO-10695 | MG = MT = MA-MG-MA = dG = dA = d5C = dA = |
| | | d5C = d5C = dT = d5C = d5C = d5C = M5C-MG-M5C = MA = M5C |
| 868 | CO-10696 | MG = MT-MA-MG-MA = dG = dA = d5C = dA = d5C = |
| | | d5C = dT = d5C = d5C = d5C = M5C-MG-M5C-MA = M5C |
| 869 | CO-10697 | MT = MG = MT = MA = MG = MA = dG = dA = d5C = |
| | | dA = d5C = d5C = dT = d5C = d5C = d5C = M5C = MG = M5C = MA = M5C = M5C |
| 870 | CO-10699 | MT = MA = MG = MA = MG = dA = d5C = dA = |
| | | d5C = d5C = dT = d5C = d5C = d5C = d5C = MG = M5C = MA = M5C = M5C |
| 871 | CO-10700 | MT = MT = MG = MT = MA = dG = dA = dG = dA = |
| | | d5C = dA = d5C = d5C = dT = d5C = M5C = M5C = M5C = MG = M5C |
| 872 | CO-10701 | MT = MT = MG = MT = MT = dG = dT = dA = dG = |
| | | dA = dG = dA = d5C = dA = d5C = M5C = MT = M5C = M5C = M5C |
| 873 | CO-10702 | MA = MG = MT = MT = MG = dT = dT = dG = dT = |
| | | dA = dG = dA = dG = dA = d5C = MA = M5C = M5C = MT = M5C |
| 874 | CO-10703 | MG = M5C = MA = MG = MT = dT = dG = dT = dT = |
| | | dG = dT = dA = dG = dA = dG = MA = M5C = MA = M5C = M5C |
| 875 | CO-10704 | MA = M5C = MA = MT = M5C = dT = dA = M5C = dA = |
| | | dG = MT = dG = d5C = M5C = d5C = MG = MG = MT = MA = M5C |
| 876 | CO-10705 | MA = M5C = LA = MT = M5C = dT = dA = d5C = dA = |
| | | dG = dT = dG = d5C = d5C = d5C = MG = MG = LT = MA = M5C |
| 877 | CO-10706 | MA = M5C = LA = MT = L5C = dT = dA = d5C = dA = |
| | | dG = dT = dG = d5C = d5C = d5C = LG = MG = LT = MA = M5C |
| 878 | CO-10707 | MA = L5C = MA = LT = M5C = dT = dA = d5C = dA = |
| | | dG = dT = dG = d5C = d5C = d5C = MG = LG = MT = LA = M5C |
| 879 | CO-10708 | MA = L5C = MA = LT = M5C = dT = dA = M5C = dA = |
| | | dG = MT = dG = d5C = M5C = d5C = MG = LG = MT = LA = M5C |
| 880 | CO-10709 | LA = M5C = LA = MT = M5C = dT = dA = d5C = dA = |
| | | dG = dT = dG = d5C = d5C = d5C = MG = MG = LT = MA = L5C |
| 881 | CO-10710 | MA = M5C = MA-MT-M5C = dT = dA = d5C = dA = |
| | | dG = dT = dG = d5C = d5C = d5C = MG-MG-MT = MA = M5C |
| 882 | CO-10711 | MA = M5C-MA-MT-M5C = dT = dA = d5C = dA = |
| | | dG = dT = dG = d5C = d5C = d5C = MG-MG-MT-MA = M5C |
| 883 | CO-10712 | M5C = MA = M5C = MA = MT = M5C = dT = dA = d5C = |
| | | dA = dG = dT = dG = d5C = d5C = d5C = MG = MG = MT = MA = M5C = MT |
| 884 | CO-10714 | M5C = MT = MA = M5C = MA = dG = dT = dG = |
| | | d5C = d5C = d5C = dG = dG = dT = dA = M5C = MT = M5C = MG = M5C |
| 885 | CO-10715 | MA = MT = M5C = MT = MA = d5C = dA = dG = |
| | | dT = dG = d5C = d5C = d5C = dG = dG = MT = MA = M5C = MT = M5C |
| 886 | CO-10716 | MA = M5C = MA = M5C = MA = dT = d5C = dT = |
| | | dA = d5C = dA = dG = dT = dG = d5C = M5C = M5C = MG = MG = MT |
| 887 | CO-10717 | MT = MA = M5C = MA = M5C = dA = d5C = dA = |
| | | dT = d5C = dT = dA = d5C = dA = dG = MT = MG = M5C = M5C = M5C |
| 888 | CO-10718 | M5C = M5C = MT = MA = M5C = dA = d5C = dA = |
| | | d5C = dA = dT = d5C = dT = dA = d5C = MA = MG = MT = MG = M5C |
| 889 | CO-10719 | MT = M5C = M5C = M5C = MT = dA = d5C = dA = |
| | | d5C = dA = d5C = dA = dT = d5C = dT = MA = M5C = MA = MG = MT |
| 890 | CO-10720 | MA = M5C = MT = MG = MT = d5C = d5C = MT = |
| | | dG = dA = MA = d5C = dT = MG = dT = MA = MT = MG = MG = M5C |
| 891 | CO-10721 | MA = M5C = LT = MG = MT = d5C = d5C = dT = |
| | | dG = dA = dA = d5C = dT = dG = dT = MA = MT = LG = MG = M5C |
| 892 | CO-10722 | MA = M5C = LT = MG = LT = d5C = d5C = dT = |
| | | dG = dA = dA = d5C = dT = dG = dT = LA = MT = LG = MG = M5C |
| 893 | CO-10723 | MA = L5C = MT = LG = MT = d5C = d5C = dT = dG = |
| | | dA = dA = d5C = dT = dG = dT = MA = LT = MG = LG = M5C |
| 894 | CO-10724 | MA = L5C = MT = LG = MT = d5C = d5C = MT = dG = |
| | | dA = MA = d5C = dT = MG = dT = MA = LT = MG = LG = M5C |
| 895 | CO-10725 | LA = M5C = LT = MG = MT = d5C = d5C = dT = dG = |
| | | dA = dA = d5C = dT = dG = dT = MA = MT = LG = MG = L5C |
| 896 | CO-10726 | MA = M5C = MT-MG-MT = d5C = d5C = dT = dG = |
| | | dA = dA = d5C = dT = dG = dT = MA-MT-MG = MG = M5C |
| 897 | CO-10727 | MA = M5C-MT-MG-MT = d5C = d5C = dT = dG = |
| | | dA = dA = d5C = dT = dG = dT = MA-MT-MG-MG = M5C |
| 898 | CO-10728 | M5C = MA = M5C = MT = MG = MT = d5C = d5C = |
| | | dT = dG = dA = dA = d5C = dT = dG = dT = MA = MT = MG = MG = M5C = MT |
| 899 | CO-10730 | MT = MG = MT = M5C = M5C = dT = dG = dA = dA = |
| | | d5C = dT = dG = dT = dA = dT = MG = MG = M5C = MT = MG |
| 900 | CO-10731 | M5C = MA = M5C = MT = MG = dT = d5C = d5C = |
| | | dT = dG = dA = dA = d5C = dT = dG = MT = MA = MT = MG = MG |
| 901 | CO-10732 | MT = M5C = M5C = M5C = MA = d5C = dT = dG = |
| | | dT = d5C = d5C = dT = dG = dA = dA = M5C = MT = MG = MT = MA |
| 902 | CO-10733 | M5C = MT = M5C = M5C = M5C = dA = d5C = dT = |
| | | dG = dT = d5C = d5C = dT = dG = dA = MA = M5C = MT = MG = MT |
| 903 | CO-10734 | MA = MG = MA = M5C = MT = d5C = d5C = d5C = dA = |
| | | d5C = dT = dG = dT = d5C = d5C = MT = MG = MA = MA = M5C |
| 904 | CO-10735 | MG = MT = MA = MA = MG = dA = d5C = dT = d5C = |
| | | d5C = d5C = dA = d5C = dT = dG = MT = M5C = M5C = MT = MG |
| 905 | CO-10736 | MG = MT = MG = MA = MA = dA = dT = MA = dT = |
| | | dG = M5C = dG = d5C = MT = d5C = M5C = M5C = MT = M5C = M5C |
| 906 | CO-10737 | MG = MT = LG = MA = MA = dA = dT = dA = dT = |
| | | dG = d5C = dG = d5C = dT = d5C = M5C = M5C = LT = M5C = M5C |
| 907 | CO-10738 | MG = MT = LG = MA = LA = dA = dT = dA = dT = |
| | | dG = d5C = dG = d5C = dT = d5C = L5C = M5C = LT = M5C = M5C |
| 908 | CO-10739 | MG = LT = MG = LA = MA = dA = dT = dA = dT = |
| | | dG = d5C = dG = d5C = dT = d5C = M5C = L5C = MT = L5C = M5C |
| 909 | CO-10740 | MG = LT = MG = LA = MA = dA = dT = MA = dT = |
| | | dG = M5C = dG = d5C = MT = d5C = M5C = L5C = MT = L5C = M5C |
| 910 | CO-10741 | LG = MT = LG = MA = MA = dA = dT = dA = dT = |
| | | dG = d5C = dG = d5C = dT = d5C = M5C = M5C = LT = M5C = L5C |
| 911 | CO-10742 | MG = MT = MG-MA-MA = dA = dT = dA = dT = dG = |
| | | d5C = dG = d5C = dT = d5C = M5C-M5C-MT = M5C = M5C |
| 912 | CO-10743 | MG = MT-MG-MA-MA = dA = dT = dA = dT = dG = |
| | | d5C = dG = d5C = dT = d5C = M5C-M5C-MT-M5C = M5C |
| 913 | CO-10744 | MT = MG = MT = MG = MA = MA = dA = dT = dA = |
| | | dT = dG = d5C = dG = d5C = dT = d5C = M5C = M5C = MT = M5C = M5C = MT |
| 914 | CO-10746 | MT = MA = MT = MG = M5C = dG = d5C = dT = d5C = |
| | | d5C = d5C = dT = d5C = d5C = dT = MT = M5C = MA = MG = MA |
| 915 | CO-10747 | MA = MA = MT = MA = MT = dG = d5C = dG = d5C = |
| | | dT = d5C = d5C = d5C = dT = d5C = M5C = MT = MT = M5C = MA |
| 916 | CO-10748 | MG = MA = MA = MA = MT = dA = dT = dG = d5C = |
| | | dG = d5C = dT = d5C = d5C = d5C = MT = M5C = M5C = MT = MT |
| 917 | CO-10749 | M5C = MT = MG = MT = MG = dA = dA = dA = dT = |
| | | dA = dT = dG = d5C = dG = d5C = MT = M5C = M5C = M5C = MT |
| 918 | CO-10750 | MT = MT = M5C = MT = MG = dT = dG = dA = dA = |
| | | dA = dT = dA = dT = dG = d5C = MG = M5C = MT = M5C = M5C |
| 919 | CO-10751 | MT = MG = MT = MT = M5C = dT = dG = dT = dG = |
| | | dA = dA = dA = dT = dA = dT = MG = M5C = MG = M5C = MT |
| 920 | CO-10752 | MG = MT = MT = MG = MT = dT = d5C = dT = dG = |
| | | dT = dG = dA = dA = dA = dT = MA = MT = MG = M5C = MG |
| 921 | CO-10753 | MT = MA = LG = MT = MG = LG = MA = MA = LG = |
| | | MA = MT = LG = MT = M5C = LG = MG = MA = LG = M5C = MT |
| 922 | CO-10754 | MT = MA = MG = MT = LG = MG = MA = MA = LG = |
| | | MA = MT = MG = LT = M5C = MG = MG = LA = MG = M5C = MT |
| 923 | CO-10755 | MT = MA = MG = LT = MG = MG = MA = LA = MG = |
| | | MA = MT = LG = MT = M5C = MG = LG = MA = MG = M5C = MT |
| 924 | CO-10756 | MT = LA = MG = MT = LG = MG = MA = LA = MG = |
| | | MA = LT = MG = MT = L5C = MG = MG = LA = MG = M5C = LT |
| 925 | CO-10757 | LT = MA = MG = LT = MG = MG = LA = MA = MG = |
| | | LA = MT = MG = LT = M5C = MG = LG = MA = MG = L5C = MT |
| 926 | CO-10758 | MT = MA = MG = MT = MG = dG = dA = MA = dG = |
| | | dA = MT = dG = dT = M5C = dG = MG = MA = MG = M5C = MT |
| 927 | CO-10759 | MT = MA = MG-MT-MG = MG = MA = MA = MG = |
| | | MA = MT = MG = MT = M5C = MG = MG-MA-MG = M5C = MT |
| 928 | CO-10760 | MT = MA-MG-MT-MG = MG = MA = MA = MG = MA = |
| | | MT = MG = MT = M5C = MG = MG-MA-MG-M5C = MT |
| 929 | CO-10761 | M5C = MT = MA = MG = MT = MG = MG = MA = MA = MG = |
| | | MA = MT = MG = MT = M5C = MG = MG = MA = MG = M5C = MT = MA |
| 930 | CO-10762 | MG = MG = MA = MA = MG = MA = MT = MG = MT = |
| | | M5C = MG = MG = MA = MG = M5C = MT = MA = MG = MG = MG |
| 931 | CO-10763 | MG = MT = MG = MG = MA = MA = MG = MA = MT = |
| | | MG = MT = M5C = MG = MG = MA = MG = M5C = MT = MA = MG |
| 932 | CO-10764 | M5C = M5C = MT = MA = MG = MT = MG = MG = MA = |
| | | MA = MG = MA = MT = MG = MT = M5C = MG = MG = MA = MG |
| 933 | CO-10765 | M5C = MA = M5C = M5C = MT = MA = MG = MT = MG = |
| | | MG = MA = MA = MG = MA = MT = MG = MT = M5C = MG = MG |
| 934 | CO-10766 | MG = M5C = LT = M5C = M5C = LT = M5C = MT = L5C = |
| | | MT = MT = LG = MT = M5C = L5C = MG = MT = LA = M5C = MT |
| 935 | CO-10767 | MG = M5C = MT = M5C = L5C = MT = M5C = MT = L5C = |
| | | MT = MT = MG = LT = M5C = M5C = MG = LT = MA = M5C = MT |
| 936 | CO-10768 | MG = M5C = MT = L5C = M5C = MT = M5C = LT = M5C = |
| | | MT = MT = LG = MT = M5C = M5C = LG = MT = MA = M5C = MT |
| 937 | CO-10769 | MG = L5C = MT = M5C = L5C = MT = M5C = LT = M5C = |
| | | MT = LT = MG = MT = L5C = M5C = MG = LT = MA = M5C = LT |
| 938 | CO-10770 | LG = M5C = MT = L5C = M5C = MT = L5C = MT = M5C = |
| | | LT = MT = MG = LT = M5C = M5C = LG = MT = MA = L5C = MT |
| 939 | CO-10771 | MG = M5C = MT = M5C = M5C = dT = d5C = MT = d5C = |
| | | dT = MT = dG = dT = M5C = d5C = MG = MT = MA = M5C = MT |
| 940 | CO-10772 | MG = M5C = MT-M5C-M5C = MT = M5C = MT = M5C = |
| | | MT = MT = MG = MT = M5C = M5C = MG-MT-MA = M5C = MT |
| 941 | CO-10773 | MG = M5C-MT-M5C-M5C = MT = M5C = MT = M5C = |
| | | MT = MT = MG = MT = M5C = M5C = MG-MT-MA-M5C = MT |
| 942 | CO-10774 | MA = MG = M5C = MT = M5C = M5C = MT = M5C = MT = |
| | | M5C = MT = MT = MG = MT = M5C = M5C = MG = MT = MA = |
| | | M5C = MT = MT |
| 943 | CO-10775 | M5C = MT = M5C = MT = M5C = MT = MT = MG = MT = |
| | | M5C = M5C = MG = MT = MA = M5C = MT = MT = M5C = M5C = M5C |
| 944 | CO-10776 | MT = M5C = M5C = MT = M5C = MT = M5C = MT = MT = |
| | | MG = MT = M5C = M5C = MG = MT = MA = M5C = MT = MT = M5C |
| 945 | CO-10777 | M5C = MA = MG = M5C = MT = M5C = M5C = MT = M5C = |
| | | MT = M5C = MT = MT = MG = MT = M5C = M5C = MG = MT = MA |
| 946 | CO-10778 | MG = M5C = M5C = MA = MG = M5C = MT = M5C = M5C = |
| | | MT = M5C = MT = M5C = MT = MT = MG = MT = M5C = M5C = MG |
| 947 | CO-10779 | MA = MG = MG = MA = MA = M5C = M5C = MA = M5C = |
| | | M5C = M5C = M5C = MA = M5C = MT = M5C = MT = MT = MG = MG |
| 948 | CO-10780 | M5C = M5C = L5C = MG = M5C = L5C = MT = M5C = LT = |
| | | MA = M5C = LG = MT = MA = LG = MA = M5C = LA = MA = MG |
| 949 | CO-10781 | M5C = M5C = M5C = MG = L5C = M5C = MT = M5C = LT = |
| | | MA = M5C = MG = LT = MA = MG = MA = L5C = MA = MA = MG |
| 950 | CO-10782 | M5C = M5C = M5C = LG = M5C = M5C = MT = L5C = MT = |
| | | MA = M5C = LG = MT = MA = MG = LA = M5C = MA = MA = MG |
| 951 | CO-10783 | M5C = L5C = M5C = MG = L5C = M5C = MT = L5C = MT = |
| | | MA = L5C = MG = MT = LA = MG = MA = L5C = MA = MA = LG |
| 952 | CO-10784 | L5C = M5C = M5C = LG = M5C = M5C = LT = M5C = MT = |
| | | LA = M5C = MG = LT = MA = MG = LA = M5C = MA = LA = MG |
| 953 | CO-10785 | M5C = M5C = M5C = MG = M5C = d5C = dT = M5C = |
| | | dT = dA = M5C = dG = dT = MA = dG = MA = M5C = MA = MA = MG |
| 954 | CO-10786 | M5C = M5C = M5C-MG-M5C = M5C = MT = M5C = MT = |
| | | MA = M5C = MG = MT = MA = MG = MA-M5C-MA = MA = MG |
| 955 | CO-10787 | M5C = M5C-M5C-MG-M5C = M5C = MT = M5C = MT = |
| | | MA = M5C = MG = MT = MA = MG = MA-M5C-MA-MA = MG |
| 956 | CO-10788 | MT = M5C = M5C = M5C = MG = M5C = M5C = MT = M5C = MT = |
| | | MA = M5C = MG = MT = MA = MG = MA = M5C = MA = MA = MG = |
| | | MT |
| 957 | CO-10789 | MT = M5C = MT = MA = M5C = MG = MT = MA = MG = MA = |
| | | M5C = MA = MA = MG = MT = MA = MA = M5C = M5C = MA |
| 958 | CO-10790 | M5C = M5C = MT = M5C = MT = MA = M5C = MG = MT = |
| | | MA = MG = MA = M5C = MA = MA = MG = MT = MA = MA = M5C |
| 959 | CO-10791 | M5C = MG = M5C = M5C = MT = M5C = MT = MA = M5C = |
| | | MG = MT = MA = MG = MA = M5C = MA = MA = MG = MT = MA |
| 960 | CO-10792 | MG = MT = M5C = M5C = M5C = MG = M5C = M5C = MT = |
| | | M5C = MT = MA = M5C = MG = MT = MA = MG = MA = M5C = MA |
| 961 | CO-10793 | MG = MA = MG = MT = M5C = M5C = M5C = MG = M5C = |
| | | M5C = MT = M5C = MT = MA = M5C = MG = MT = MA = MG = MA |
| 962 | CO-10794 | MG = MA = MG = MA = MG = MT = M5C = M5C = M5C = |
| | | MG = M5C = M5C = MT = M5C = MT = MA = M5C = MG = MT = MA |

[0116] In some embodiments, the ASO comprises a sequence and/or chemical modification selected from a sequence provided in any one of SEQ ID NOs: 10-4916. In some embodiments, the ASO comprises a sequence selected from a sequence provided in any one of SEQ ID NOs: 1369-4738. In some embodiments, the ASO comprises a sequence and chemical modification selected from a sequence provided in any one of SEQ ID NOs: 10-1368, or 4734-4916. In some embodiments, the ASO comprises a sequence and chemical modification selected from a sequence provided in any one of SEQ ID NOs: 10-442, 691, 991-1368, or 4743-4915. In some embodiments, the ASO comprises a sequence and chemical modification selected from a sequence provided in any one of SEQ ID NOs: 443-690, 692-990, or 4916.

### High Affinity Modified Nucleotides

[0117] A high affinity modified nucleotide is a modified nucleotide which, when incorporated into the oligonucleotide enhances the affinity of the oligonucleotide for its complementary target, for example as measured by the melting temperature (Tₘ). A high affinity modified nucleotide of the present invention preferably result in an increase in melting temperature between +0.5 to +12° C., such as between +1.5 to +10° C. or +3 to +8° C. per modified nucleotide. Numerous high affinity modified nucleotides are known in the art and include for example, many 2′ substituted nucleotides as well as locked nucleic acids (LNA) (see e.g., Freier & Altmann (1997) Nucl. Acid Res. 25: 4429-43 and Uhlmann (2000) Curr. Opinion in Drug Development 3(2): 203-213, each of which are hereby incorporated by reference).

### Sugar Modifications

[0118] The ASOs described herein may comprise one or more nucleotides which have a modified sugar moiety, i.e., a modification of the sugar moiety when compared to the ribose sugar moiety found in DNA and RNA. Numerous nucleotides with modification of the ribose sugar moiety have been made, primarily with the aim of improving certain properties of oligonucleotides, such as affinity and/or nuclease resistance. Such modifications include those where the ribose ring structure is modified, e.g., by replacement with a hexose ring (HNA), or a bicyclic ring, which typically have a biradicle bridge between the C2 and C4 carbons on the ribose ring (LNA), or an unlinked ribose ring which typically lacks a bond between the C2 and C3 carbons (e.g., UNA). Other sugar modified nucleotides include, for example, bicyclohexose nucleic acids (WO2011/017521) or tricyclic nucleic acids (WO2013/154798), both of which are hereby incorporated by reference. Modified nucleotides also include nucleotides where the sugar moiety is replaced with a non-sugar moiety, for example in the case of peptide nucleic acids (PNA), or morpholino nucleic acids.

[0119] Sugar modifications also include modifications made via altering the substituent groups on the ribose ring to groups other than hydrogen, or the 2′-OH group naturally found in RNA nucleosides. Substituents may, for example be introduced at the 2′, 3′, 4′ or 5′ positions.

[0120] In some embodiments, oligonucleotides comprise modified sugar moieties, such as any one of a 2′-O-methyl (2′OMe) moiety, a 2′-O-methoxyethyl moiety, a bicyclic sugar moiety, PNA (e.g., an oligonucleotide comprising one or more N-(2-aminoethyl)-glycine units linked by amide bonds or carbonyl methylene linkage as repeating units in place of a sugar-phosphate backbone), locked nucleotide (LNA) (e.g., an oligonucleotide comprising one or more locked ribose, and can be a mixture of 2′-deoxy nucleotides or 2′Ome nucleotides), cET (e.g., an oligonucleotide comprising one or more cET sugar), cMOE (e.g., an oligonucleotide comprising one or more cMOE sugar), morpholino oligomer (e.g., an oligonucleotide comprising a backbone comprising one or more phosphorodiamidate morpholiono oligomers), 2′-deoxy-2′-fluoro nucleotide (e.g., an oligonucleotide comprising one or more 2′-fluoro-β-D-arabinonucleotide), tcDNA (e.g., an oligonucleotide comprising one or more tcDNA modified sugar), constrained ethyl 2′-4′-bridged nucleic acid (cEt), S-cEt, ethylene bridged nucleic acid (ENA) (e.g., an oligonucleotide comprising one or more ENA modified sugar), hexitol nucleic acids (HNA) (e.g., an oligonucleotide comprising one or more HNA modified sugar), or tricyclic analog (tcDNA) (e.g., an oligonucleotide comprising one or more tcDNA modified sugar).

[0121] In some embodiments, oligonucleotides comprise nucleobase modifications selected from the group consisting of 2-thiouracil (“2-thioU”), 2-thiocytosine (“2-thioC”), 4-thiouracil (“4-thioU”), 6-thioguanine (“6-thioG”), 2-aminoadenine (“2-aminoA”), 2-aminopurine, pseudouracil, hypoxanthine, 7-deazaguanine, 7-deaza-8-azaguanine, 7-deazaadenine, 7-deaza-8-azaadenine, 5-methylcytosine (“5-methylC”), 5-methyluracil (“5-methylU”), 5-hydroxymethylcytosine, 5-hydroxymethyluracil, 5,6-dehydrouracil, 5-propynylcytosine, 5-propynyluracil, 5-ethynylcytosine, 5-ethynyluracil, 5-allyluracil (“5-allylU”), 5-allylcytosine (“5-allylC”), 5-aminoallyluracil (“5-aminoallylU”), 5-aminoallyl-cytosine (“5-aminoallylC”), an abasic nucleotide, Z base, P base, unstructured nucleic acid (“UNA”), isoguanine (“isoG”), and isocytosine (“isoC”), glycerol nucleic acid (GNA), thiomorpholino (C₄H9NS) or thiophosphoramidate morpholinos (TMOs). Synthesis of glycerol nucleic acid (GNA) (also known as glycol nucleic acids) is described in Zhang et al, Current Protocols in Nucleic Acid Chemistry 4.40.1-4.40.18, September 2010, hereby incorporated by reference. Synthesis of thiophosphoramidate morpholino oligonucleotides is described in Langer et al. J. Am. Chem. Soc. 2020, 142(38): 16240-253

### 2′ Sugar Modified Nucleotides

[0122] A 2′ sugar modified nucleotide is a nucleotide which has a substituent other than H or —OH at the 2′ position (2′ substituted nucleotide) or comprises a 2′ linked biradicle capable of forming a bridge between the 2′ carbon and a second carbon in the ribose ring, such as LNA (2′-4′ biradicle bridged) nucleotides.

[0123] Without wishing to be bound by theory, the 2′ modified sugar may provide enhanced binding affinity and/or increased nuclease resistance to the oligonucleotide. Examples of 2′ substituted modified nucleotides are 2′-O-alkyl-RNA, 2′-O-methyl-RNA, 2′-alkoxy-RNA, 2′-O-methoxyethyl-RNA (MOE), 2′-amino-DNA, 2′-Fluoro-RNA, and 2′-FANA nucleotide. For further examples, see e.g., Freier & Altmann 1997, supra; Uhlmann 2000, supra, and Deleavey and Damha (2012) Chemistry and Biology 19: 937, each of which are hereby incorporated by reference.

### Locked Nucleic Acid Nucleotides (LNA Nucleotide)

[0124] A “LNA nucleotide” is a 2′-sugar modified nucleotide which comprises a biradical linking the C2′ and C4′ of the ribose sugar ring of said nucleotide (also referred to as a “2′-4′ bridge”), which restricts or locks the conformation of the ribose ring. In other words, a locked nucleotide is a nucleotide comprising a bicyclic sugar moiety comprising a 4′-CH₂—O-2′ bridge. This structure effectively “locks” the ribose in the 3′-endo structural conformation. The addition of locked nucleotides to oligonucleotides has been shown to increase oligonucleotide stability in serum, and to reduce off-target effects (Grunweller, A. et al., (2003) Nucleic Acids Research 31(12):3185-3193). These nucleotides are also sometimes termed bridged nucleic acid or bicyclic nucleic acid (BNA). The locking of the conformation of the ribose is associated with an enhanced affinity of hybridization (duplex stabilization) when the LNA is incorporated into an oligonucleotide with complementarity to an RNA or a DNA molecule. This can be routinely determined by measuring the melting temperature of the oligonucleotide/complement duplex. Exemplary LNA nucleotides include beta-D-oxy-LNA, 6′-methyl-beta-D-oxy LNA such as (S)-6′-methyl-beta-D-oxy-LNA (ScET) and ENA.

[0125] Examples of bicyclic nucleotides for use in the polynucleotides of the disclosure include without limitation nucleotides comprising a bridge between the 4′ and the 2′ ribosyl ring atoms. In certain embodiments, the polynucleotide agents of the disclosure include one or more bicyclic nucleotides comprising a 4′ to 2′ bridge. Examples of such 4′ to 2′ bridged bicyclic nucleotides, include but are not limited to 4′-(CH₂)—O-2′ (LNA); 4′-(CH₂)—S-2′; 4′-(CH₂)₂—O-2′ (ENA); 4′-CH(CH₃)—O-2′ (also referred to as “constrained ethyl” or “cEt”) and 4′-CH(CH₂OCH₃)—O-2′ (and analogs thereof, see, e.g., U.S. Pat. No. 7,399,845); 4′-C(CH₃)(CH₃)—O-2′ (and analogs thereof; see e.g., U.S. Pat. No. 8,278,283); 4′-CH₂—N(OCH₃)-2′ (and analogs thereof, see e.g., U.S. Pat. No. 8,278,425); 4′-CH₂—O—N(CH₃)₂-2′ (see, e.g., U.S. Patent Publication No. 2004/0171570); 4′-CH₂—N(R)—O-2′, wherein R is H, C₁-C₁₂ alkyl, or a protecting group (see, e.g., U.S. Pat. No. 7,427,672); 4′-CH₂—C(H)(CH₃)-2′ (see, e.g., Chattopadhyaya et al., J. Org. Chem., 2009, 74, 118-134); and 4′-CH₂—C(═CH₂)-2′ (and analogs thereof; see, e.g., U.S. Pat. No. 8,278,426). The entire contents of each of the foregoing are hereby incorporated herein by reference.

[0126] Additional representative U.S. patents and US patent Publications that teach the preparation of locked nucleic acid nucleotides include, but are not limited to, the following: U.S. Pat. Nos. 6,268,490; 6,525,191; 6,670,461; 6,770,748; 6,794,499; 6,998,484; 7,053,207; 7,034,133; 7,084,125; 7,399,845; 7,427,672; 7,569,686; 7,741,457; 8,022,193; 8,030,467; 8,278,425; 8,278,426; 8,278,283; US 2008/0039618; and US 2009/0012281, the entire contents of each of which are hereby incorporated herein by reference.

[0127] Any of the foregoing bicyclic nucleotides can be prepared having one or more stereochemical sugar configurations including for example α-L-ribofuranose and 3-D-ribofuranose (see PCT Application Publication No. WO 99/14226, contents of which are incorporated by reference herein).

[0128] An oligonucleotide of the disclosure can also be modified to include one or more constrained ethyl nucleotides. As used herein, a “constrained ethyl nucleotide” or “cEt” is a locked nucleotide comprising a bicyclic sugar moiety comprising a 4′-CH(CH₃)—O-2′ bridge. In one embodiment, a constrained ethyl nucleotide is in the S conformation referred to herein as “S-cEt.”

[0129] An oligonucleotide of the disclosure may also include one or more “conformationally restricted nucleotides” (“CRN”). CRN are nucleotide analogs with a linker connecting the C2′ and C4′ carbons of ribose or the C3 and —C5′ carbons of ribose. CRN lock the ribose ring into a stable conformation and increase the hybridization affinity to an RNA (e.g., a regRNA or a mRNA). The linker is of sufficient length to place the oxygen in an optimal position for stability and affinity resulting in less ribose ring puckering.

[0130] Representative publications that teach the preparation of certain of the above noted CRN include, but are not limited to, US Patent Publication No. 2013/0190383; and PCT Application Publication WO 2013/036868, the entire contents of each of which are hereby incorporated herein by reference.

[0131] In some embodiments, an oligonucleotide of the disclosure comprises one or more monomers that are UNA (unlocked nucleotide) nucleotides. UNA is unlocked acyclic nucleotide, wherein any of the bonds of the sugar has been removed, forming an unlocked “sugar” residue. In one example, UNA also encompasses monomers with bonds between C1′-C4′ have been removed (i.e., the covalent carbon-oxygen-carbon bond between the C1′ and C4′ carbons). In another example, the C2′-C3′ bond (i.e., the covalent carbon-carbon bond between the C2′ and C3′ carbons) of the sugar has been removed (see Nuc. Acids Symp. Series, 52, 133-134 (2008) and Fluiter et al., Mol. Biosyst., 2009, 10, 1039 hereby incorporated by reference).

[0132] Representative U.S. publications that teach the preparation of UNA include, but are not limited to, U.S. Pat. No. 8,314,227; and US Patent Publication Nos. 2013/0096289; 2013/0011922; and 2011/0313020, the entire contents of each of which are hereby incorporated herein by reference.

[0133] The ribose sugar may also be modified with a cyclopropane ring to produce a tricyclodeoxynucleic acid (tricyclo DNA). The ribose moiety may be substituted for another sugar such as 1,5,-anhydrohexitol, threose to produce a threose nucleotide (TNA), or arabinose to produce an arabino nucleotide. The ribose molecule can also be replaced with non-sugars such as cyclohexene to produce cyclohexene nucleotide or glycol to produce glycol nucleotides.

[0134] Potentially stabilizing modifications to the ends of nucleotide molecules can include N-(acetylaminocaproyl)-4-hydroxyprolinol (Hyp-C6-NHAc), N-(caproyl-4-hydroxyprolinol (Hyp-C6), N-(acetyl-4-hydroxyprolinol (Hyp-NHAc), thymidine-2′-O-deoxythymidine (ether), N-(aminocaproyl)-4-hydroxyprolinol (Hyp-C6-amino), 2-docosanoyl-uridine-3′-phosphate, inverted base dT(idT) and others. Disclosure of this modification can be found in PCT Publication No. WO 2011/005861.

[0135] Other alternatives chemistries of an oligonucleotide of the disclosure include a 5′ phosphate or 5′ phosphate mimic, e.g., a 5′-terminal phosphate or phosphate mimic of an oligonucleotide. Suitable phosphate mimics are disclosed in, for example US Patent Publication No. 2012/0157511, the entire contents of which are incorporated herein by reference.

[0136] Additional non-limiting, exemplary LNA nucleotides are disclosed in WO 99/014226, WO 00/66604, WO 98/039352, WO 2004/046160, WO 00/047599, WO 2007/134181, WO 2010/077578, WO 2010/036698, WO 2007/090071, WO 2009/006478, WO 2011/156202, WO 2008/154401, WO 2009/067647, WO 2008/150729, Morita et al., Bioorganic & Med. Chem. Lett. 12, 73-76, Seth et al. J. Org. Chem. 2010, Vol 75(5) pp. 1569-81, Mitsuoka et al., Nucleic Acids Research 2009, 37(4), 1225-1238, and Wan and Seth, J. Medical Chemistry 2016, 59, 9645-9667, each of which are hereby incorporated by reference.

[0137] In some embodiments, the length of the ASO is 5×n+5 nucleotides (n is an integer of 3 or greater), wherein the nucleotides at positions 5×m are ribonucleotides modified by LNA (m is an integer from 1 to n) and the nucleotides at the remaining positions are ribonucleotides modified by 2′-O-methoxyethyl.

[0138] In some embodiments, the nucleotide sugar modification is 2′-O-C1-4alkyl such as 2′-O-methyl (2′-OMe), 2′-deoxy (2′-H), 2′-O-C1-3alkyl-O-C1-3alkyl such as 2′-methoxyethyl (“2′-MOE” or “MOE”), 2′-fluoro (“2′-F”), 2′-amino (“2′-NH2”), 2′-arabinosyl (“2′-arabino”) nucleotide, 2′-F-arabinosyl (“2′-F-arabino”) nucleotide, 2′-locked nucleic acid (“LNA”) nucleotide, 2′-amido bridge nucleic acid (AmNA), 2′-unlocked nucleic acid (“ULNA”) nucleotide, a sugar in L form (“L-sugar”), or 4′-thioribosyl nucleotide.

### Mixmers and Gapmers

[0139] The ASO can have a mixmer and/or gapmer structure, for example, in a pattern disclosed by the ASOs in FIG. 17 or FIG. 18.

[0140] In certain embodiments, the ASO is a mixmer. As used herein, the term “mixmer” refers to an oligonucleotide comprising an alternating composition of DNA monomers and nucleotide analogue monomers across at least a portion of the oligonucleotide sequence. In certain embodiments, the ASO is a mixmer based on the gapmer structure, comprising a mixture of DNA nucleotides and 2′-MOE nucleotides in the gap, flanked by RNA sequences (e.g., 2′-modified RNA sequences) in the wings. Mixmers may be designed to comprise a mixture of affinity enhancing nucleotide analogues, such as in non-limiting example 2′-O-alkyl-RNA monomers, 2′-amino-DNA monomers, 2′-fluoro-DNA monomers, LNA monomers, arabino nucleic acid (ANA) monomers, 2′-fluoro-ANA monomers, HNA monomers, INA monomers, 2′-MOE-RNA (2′-O-methoxyethyl-RNA), 2′Fluoro-DNA, and LNA. In some embodiments, the mixmer is incapable of recruiting RNase H. In some embodiments, the mixmer comprises one type of affinity enhancing nucleotide analogue together with DNA and/or RNA.

[0141] Multiple different modifications can be interspaced in a mixmer. For example, the ASO can comprise LNA modification in a plurality of nucleotides and a different modification in some or all of the rest of the nucleotides. In some embodiments, any two adjacent LNA-modified nucleotides are separated by at least 1, 2, 3, 4, or 5 nucleotides. Throughout the ASO, the distance between adjacent LNA-modified nucleotides can either be constant (e.g., any two adjacent LNA-modified nucleotides are separated by 1, 2, 3, 4, or 5 nucleotides) or variable. In some embodiments, the length of the ASO is 3×n, 3×n−1, or 3×n−2 nucleotides (n is an integer of 6 or greater), wherein (a) (i) the nucleotides at positions 3×m−2 (m is an integer from 1 to n) are nucleotides (e.g., ribonucleotides or deoxyribonucleotides) comprising a first modification (e.g., LNA), (ii) the nucleotides at positions 3×m−1 (m is an integer from 1 to n) are nucleotides (e.g., ribonucleotides or deoxyribonucleotides) comprising a first modification (e.g., LNA), or (iii) the nucleotides at positions 3×m (m is an integer from 1 to n) are nucleotides (e.g., ribonucleotides or deoxyribonucleotides) comprising a first modification (e.g., LNA); and (b) the nucleotides at the remaining positions comprise a second, different modification (e.g., 2′-O-methoxyethyl. In some embodiments, the length of the ASO is 2×n or 2×n−1 nucleotides (n is an integer of 9 or greater), wherein (a) (i) the nucleotides at positions 2×m−1 (m is an integer from 1 to n) are nucleotides (e.g., ribonucleotides or deoxyribonucleotides) comprising a first modification (e.g., LNA), or (ii) the nucleotides at positions 2×m (m is an integer from 1 to n) are nucleotides (e.g., ribonucleotides or deoxyribonucleotides) comprising a first modification (e.g., LNA); and (b) the nucleotides at the remaining positions comprise a second, different modification (e.g., 2′-O-methoxyethyl). Similar modification patterns, for example, where the first modification is repeated every 4, 5, or more nucleotides, are also contemplated.

[0142] In certain embodiments, the ASO comprises a DNA sequence (e.g., having at least 1, 2, 3, 4, 5, 6, 7, 8, 9, 10, 11, 12, 13, 14, or 15 contiguous nucleotides of unmodified DNA) flanked on both sides by RNA sequences (e.g., 2′-modified RNA sequences or 2′-modified ribonucleotides). Such structure is known as “gapmer,” in which the DNA region is referred to as the “gap” and the RNA regions is referred to as the “wings” (see, e.g., PCT Application Publication No. WO2013/177248). Gapmers were known to facilitate degradation of the target RNA by recruiting nucleases (e.g., nuclear RNAses (e.g., RNase H)). Surprisingly, in some embodiments of the present disclosure, it has been discovered that a gapmer that binds to a regRNA, having the same sequence as having a parent ASO but having different chemical modifications, can also increase target gene expression.

[0143] In some embodiments, the ASO gapmer comprises an internal DNA region flanked by two external RNA “wings.” For example, the internal DNA gap can comprise at least 49, 48, 47, 46, 45, 44, 43, 42, 41, 40, 39, 38, 37, 36, 35, 34, 33, 32, 31, 30, 29, 28, 27, 26, 25, 24, 23, 22, 21, 20, 19, 18, 17, 16, 15, 14, 13, 12, 11, 10, 9, 8, 7, 6, 5, 4, 3, 2, or 1 nucleotide(s), while each of the external RNA wing(s) can independently comprise 1, 2, 3, 4, 5, 6, 7, 8, 9, 10, 11, 12, 13, 14, 15, 16, 17, 18, 19, 20, 21, 22, 23, 24, 25, 26, 27, 28, 29, 30, 31, 32, 33, 34, 35, 36, 37, 38, 39, 40, 41, 42, 43, 44, 45, 46, 47, 48, 49, 50 or more nucleotides. Exemplary gapmer structures include, but are not limited to a 1-10-9, 2-10-8, 3-10-7, 4-10-6, 6-10-4, 7-10-3, 8-10-2, 9-10-1, 1-18-1, 2-16-2, 3-14-3, 4-12-4, 5-10-5, 6-8-6, 7-6-7, 8-5-7, 7-5-8, 8-4-8, or 9-2-9 structure where the first and third number indicate the number of external RNA nucleotides and the second number indicates the number of internal DNA nucleotides.

[0144] The ASO can also be a mixmer comprising one DNA region linked to one RNA region. In some embodiments, the mixmer comprises at least 10 DNA nucleotides linked to at least 10 RNA nucleotides, wherein the DNA nucleotides are at the 5′ end of the mixmer or the 3′ end of the mixmer. In some embodiments, the mixmer comprises at least 1, 2, 3, 4, 5, 6, 7, 8, 9, 10, 11, 12, 13, 14, 15, 16, 17, 18, or 19 DNA nucleotide(s) linked to at least 49, 48, 47, 46, 45, 44, 43, 42, 41, 40, 39, 38, 37, 36, 35, 34, 33, 32, 31, 30, 29, 28, 27, 26, 25, 24, 23, 22, 21, 20, 19, 18, 17, 16, 15, 14, 13, 12, 11, 10, 9, 8, 7, 6, 5, 4, 3, 2, or 1 RNA nucleotide(s), wherein the DNA nucleotides are at the 5′ end of the mixmer or the 3′ end of the mixmer. In some embodiment, the RNA regions of the gapmer or mixmer can comprise any additional chemical modification as disclosed herein.

[0145] In certain embodiments, the ASO (e.g., the gapmer or mixmer) is about 8, 9, 10, 11, 12, 13, 14, 15, 16, 17, 18, 19, 20, 21, 22, 23, 24, 25, 26, 27, 28, 29, 30, 31, 32, 33, 34, 35, 36, 37, 38, 39, 40, 41, 42, 43, 44, 45, 46, 47, 48, 49, 50 or more nucleotides in length. In certain embodiments, the gap is about 1, 2, 3, 4, 5, 6, 7, 8, 9, 10, 11, 12, 13, 14, 15, 16, 17, 18, 19, or more nucleotides in length. In certain embodiments, one or both wings are about 2, 3, 4, 5, 6, 7, 8, 9, 10, 11, 12, 13, 14, 15, 16, 17, 18, or 19 or more nucleotides in length. In certain embodiments, one or both RNA region or wing comprises RNA modifications, for example, β-D-ribonucleotides, 2′-modified nucleotides (e.g., 2′-O-(2-methoxyethyl) (2′-MOE), 2′-O—CH₃, or 2′-fluoro-arabino (FANA)), and bicyclic sugar modified nucleotides (e.g., having a constrained ethyl or locked nucleic acid (LNA)). In certain embodiments, each ribonucleotide in the mixmer or gapmer is modified by 2′-MOE. In certain embodiments, the mixmer or gapmer comprises one or more modified internucleotide bonds, e.g., phosphorothioate (PS) internucleotide linkage. In certain embodiments, each two adjacent nucleotides in the mixmer or gapmer are linked by a phosphorothioate internucleotide bond.

[0146] In certain embodiments, the ASO does not comprise 1 or more, 2 or more, 3 or more, 4 or more, 5 or more, 6 or more, 7 or more, 8 or more, 9 or more, 10 or more, 10 or more, 11 or more, 12 or more, 13 or more, 14 or more, 15 or more, 20 or more, 25 or more, 30 or more, 35 or more, 40 or more, or 45 or more contiguous nucleotides of unmodified DNA. In some embodiments, such a DNA sequence is disrupted by modified (e.g., 2′-MOE modified) ribonucleotides every 2, 3, 4, 5, or more nucleotides. In some embodiments, the ASO comprises only ribonucleotides and no deoxyribonucleotides.

[0147] The structural features of mixmer and gapmer can be combined. In certain embodiments, the ASO has a structure similar to that of a mixmer disclosed herein (e.g., one having interspaced modifications), except that the second modification in the gap is changed to a third modification (e.g., deoxyribonucleotide). In certain embodiments, the ASO has a structure similar to that of a gapmer disclosed herein, except that in the gap the nucleotides are modified in a mixmer pattern.

[0148] In certain embodiments, the ASO further comprises a ligand moiety, e.g., a ligand moiety that specifically targets a tissue or organ in a subject. For example, N-Acetylgalactosamine (GalNAc) specifically targets liver. In certain embodiments, the ligand moiety comprises GalNAc. In certain embodiments, the ligand moiety comprises a three-cluster GalNAc moiety, commonly denoted GalNAc3. Other types of GalNAc moieties are one cluster, two cluster or four cluster GalNAc, denoted as GalNAc1, GalNAc2, or GalNAc4. In certain embodiments, the ligand moiety comprises GalNAc1, GalNAc2, GalNAc3, or GalNAc4.

[0149] In certain embodiments, the ligand moiety comprises biotin. In certain embodiments, the ligand moiety comprises palmitic acid. In certain embodiments, the ligand moiety comprises a Spacer 18 moiety (C18).

### III. Pharmaceutical Compositions

[0150] In certain embodiments, the ASOs disclosed herein can be present in pharmaceutical compositions. The pharmaceutical composition can be formulated for use in a variety of drug delivery systems. One or more pharmaceutically acceptable excipients or carriers can also be included in the composition for proper formulation. In some embodiments, the pharmaceutical acceptable carrier comprises sterile saline, sterile water, phosphate buffered saline (PBS), or aCSF. Suitable formulations for use in the present disclosure are found in Remington's Pharmaceutical Sciences, Mack Publishing Company, Philadelphia, Pa., 17th ed., 1985. For a brief review of methods for drug delivery, see, e.g., Langer (Science 249:1527-1533, 1990).

[0151] Exemplary carriers and pharmaceutical formulations suitable for delivering nucleic acids are described in Durymanov and Reineke (2018) Front. Pharmacol. 9:971; Barba et al. (2019) Pharmaceutics 11(8): 360; Ni et al. (2019) Life (Basel) 9(3): 59, each of which is incorporated herein by reference. It is understood that the presence of a ligand moiety conjugated to the ASO may circumvent the need for a carrier for delivery to a tissue or organ targeted by the ligand moiety.

[0152] The delivery of an oligonucleotide of the disclosure to a cell e.g., a cell within a subject, such as a human subject e.g., a subject in need thereof, such as a subject having a GRN related disorder can be achieved in a number of different ways. For example, delivery may be performed by contacting a cell with an oligonucleotide of the disclosure ither in vitro or in vivo. In vivo delivery may also be performed directly by administering a composition comprising an oligonucleotide to a subject. These alternatives are discussed further below.

[0153] In general, any method of delivering a nucleic acid molecule (in vitro or in vivo) can be adapted for use with an oligonucleotide of the disclosure (see e.g., Akhtar S. and Julian R L., (1992) Trends Cell. Biol. 2(5):139-144 and WO 94/02595, which are incorporated herein by reference in their entireties). For in vivo delivery, factors to consider in order to deliver an oligonucleotide molecule include, for example, biological stability of the delivered molecule, prevention of non-specific effects, and accumulation of the delivered molecule in the target tissue. The non-specific effects of an oligonucleotide can be minimized by local administration, for example, by direct injection or implantation into a tissue or topically administering the preparation. Local administration to a treatment site maximizes local concentration of the agent, limits the exposure of the agent to systemic tissues that can otherwise be harmed by the agent or that can degrade the agent, and permits a lower total dose of the oligonucleotide molecule to be administered.

[0154] For administering an oligonucleotide systemically for the treatment of a disease, the oligonucleotide can include alternative nucleobases, alternative sugar moieties, and/or alternative internucleotide linkages, or alternatively delivered using a drug delivery system; both methods act to prevent the rapid degradation of the oligonucleotide by endo- and exo-nucleases in vivo. Modification of the oligonucleotide or the pharmaceutical carrier can also permit targeting of the oligonucleotide composition to the target tissue and avoid undesirable off-target effects. Oligonucleotide molecules can be modified by chemical conjugation to lipophilic groups such as cholesterol to enhance cellular uptake and prevent degradation. In an alternative embodiment, the oligonucleotide can be delivered using drug delivery systems such as a nanoparticle, a lipid nanoparticle, a polyplex nanoparticle, a lipoplex nanoparticle, a dendrimer, a polymer, liposomes, or a cationic delivery system. Positively-charged cationic delivery systems facilitate binding of an oligonucleotide molecule (negatively charged) and also enhance interactions at the negatively charged cell membrane to permit efficient uptake of an oligonucleotide by the cell. Cationic lipids, dendrimers, or polymers can either be bound to an oligonucleotide, or induced to form a vesicle or micelle that encases an oligonucleotide. The formation of vesicles or micelles further prevents degradation of the oligonucleotide when administered systemically. In general, any methods of delivery of nucleic acids known in the art may be adaptable to the delivery of the oligonucleotides of the disclosure. Methods for making and administering cationic oligonucleotide complexes are well within the abilities of one skilled in the art (see e.g., Sorensen, D R., et al. (2003) J. Mol. Biol 327:761-766; Verma, U N. et al., (2003) Clin. Cancer Res. 9:1291-1300; Arnold, A S et al., (2007) J. Hypertens. 25:197-205, which are incorporated herein by reference in their entirety). Some non-limiting examples of drug delivery systems useful for systemic delivery of oligonucleotides include DOTAP (Sorensen, D R., et al (2003), supra; Verma, U N. et al., (2003), supra), Oligofectamine, “solid nucleic acid lipid particles” (Zimmermann, T S. et al., (2006) Nature 441:111-114), cardiolipin (Chien, P Y. et al., (2005) Cancer Gene Ther. 12:321-328; Pal, A. et al., (2005) Int J. Oncol. 26:1087-1091), polyethyleneimine (Bonnet M E. et al., (2008) Pharm. Res. August 16 Epub ahead of print; Aigner, A. (2006) J. Biomed. Biotechnol. 71659), Arg-Gly-Asp (RGD) peptides (Liu, S. (2006) Mol. Pharm. 3:472-487), and polyamidoamines (Tomalia, D A. et al., (2007) Biochem. Soc. Trans. 35:61-67; Yoo, H. et al., (1999) Pharm. Res. 16:1799-1804). In some embodiments, an oligonucleotide forms a complex with cyclodextrin for systemic administration. Methods for administration and pharmaceutical compositions of oligonucleotides and cyclodextrins can be found in U.S. Pat. No. 7,427,605, which is herein incorporated by reference in its entirety. In some embodiments the oligonucleotides of the disclosure are delivered by polyplex or lipoplex nanoparticles. Methods for administration and pharmaceutical compositions of oligonucleotides and polyplex nanoparticles and lipoplex nanoparticles can be found in U.S. Patent Application Nos. 2017/0121454; 2016/0369269; 2016/0279256; 2016/0251478; 2016/0230189; 2015/0335764; 2015/0307554; 2015/0174549; 2014/0342003; 2014/0135376; and 2013/0317086, which are herein incorporated by reference in their entirety.

[0155] In some embodiments, the compounds described herein may be administered in combination with additional therapeutics. Examples of additional therapeutics include standard of care anti-epilepsy medications such as quinidine and/or sodium channel blockers. Additionally, the compounds described herein may be administered in combination with recommended lifestyle changes such as a ketogenic diet.

### Membranous Molecular Assembly Delivery Methods

[0156] Oligonucleotides of the disclosure can also be delivered using a variety of membranous molecular assembly delivery methods including polymeric, biodegradable microparticle, or microcapsule delivery devices known in the art. For example, a colloidal dispersion system may be used for targeted delivery of an oligonucleotide agent described herein. Colloidal dispersion systems include macromolecule complexes, nanocapsules, microspheres, beads, and lipid-based systems including oil-in-water emulsions, micelles, mixed micelles, and liposomes. Liposomes are artificial membrane vesicles that are useful as delivery vehicles in vitro and in vivo. It has been shown that large unilamellar vesicles (LUV), which range in size from 0.2-4.0 μm can encapsulate a substantial percentage of an aqueous buffer containing large macromolecules. Liposomes are useful for the transfer and delivery of active ingredients to the site of action. Because the liposomal membrane is structurally similar to biological membranes, when liposomes are applied to a tissue, the liposomal bilayer fuses with bilayer of the cellular membranes. As the merging of the liposome and cell progresses, the internal aqueous contents that include the oligonucleotide are delivered into the cell where the oligonucleotide can specifically bind to a target RNA. In some cases, the liposomes are also specifically targeted, e.g., to direct the oligonucleotide to particular cell types. The composition of the liposome is usually a combination of phospholipids, usually in combination with steroids, especially cholesterol. Other phospholipids or other lipids may also be used. The physical characteristics of liposomes depend on pH, ionic strength, and the presence of divalent cations.

[0157] A liposome containing an oligonucleotide can be prepared by a variety of methods. In one example, the lipid component of a liposome is dissolved in a detergent so that micelles are formed with the lipid component. For example, the lipid component can be an amphipathic cationic lipid or lipid conjugate. The detergent can have a high critical micelle concentration and may be nonionic. Exemplary detergents include cholate, CHAPS, octylglucoside, deoxycholate, and lauroyl sarcosine. The oligonucleotide preparation is then added to the micelles that include the lipid component. The cationic groups on the lipid interact with the oligonucleotide and condense around the oligonucleotide to form a liposome. After condensation, the detergent is removed, e.g., by dialysis, to yield a liposomal preparation of oligonucleotide.

[0158] If necessary, a carrier compound that assists in condensation can be added during the condensation reaction, e.g., by controlled addition. For example, the carrier compound can be a polymer other than a nucleic acid (e.g., spermine or spermidine). The pH can also be adjusted to favor condensation.

[0159] Methods for producing stable polynucleotide delivery vehicles, which incorporate a polynucleotide/cationic lipid complex as a structural component of the delivery vehicle, are further described in, e.g., WO 96/37194, the entire contents of which are incorporated herein by reference. Liposome formation can also include one or more aspects of exemplary methods described in Feigner, P. L. et al., (1987) Proc. Natl. Acad. Sci. USA 8:7413-7417; U.S. Pat. Nos. 4,897,355; 5,171,678; Bangham et al., (1965) M. Mol. Biol. 23:238; Olson et al., (1979) Biochim. Biophys. Acta 557:9; Szoka et al., (1978) Proc. Natl. Acad. Sci. 75: 4194; Mayhew et al., (1984) Biochim. Biophys. Acta 775:169; Kim et al., (1983) Biochim. Biophys. Acta 728:339; and Fukunaga et al., (1984) Endocrinol. 115:757. Commonly used techniques for preparing lipid aggregates of appropriate size for use as delivery vehicles include sonication and freeze-thaw plus extrusion (see, e.g., Mayer et al., (1986) Biochim. Biophys. Acta 858:161. Microfluidization can be used when consistently small (50 to 200 nm) and relatively uniform aggregates are desired (Mayhew et al., (1984) Biochim. Biophys. Acta 775:169). These methods are readily adapted to packaging oligonucleotide preparations into liposomes.

[0160] Liposomes fall into two broad classes. Cationic liposomes are positively-charged liposomes which interact with the negatively charged nucleic acid molecules to form a stable complex. The positively-charged nucleic acid/liposome complex binds to the negatively charged cell surface and is internalized in an endosome. Due to the acidic pH within the endosome, the liposomes are ruptured, releasing their contents into the cell cytoplasm (Wang et al. (1987) Biochem. Biophys. Res. Commun., 147:980-985).

[0161] Liposomes, which are pH-sensitive or negatively charged, entrap nucleic acids rather than complex with them. Since both the nucleic acid and the lipid are similarly charged, repulsion rather than complex formation occurs. Nevertheless, some nucleic acid is entrapped within the aqueous interior of these liposomes. pH sensitive liposomes have been used to deliver nucleic acids encoding the thymidine kinase gene to cell monolayers in culture. Expression of the exogenous gene was detected in the target cells (Zhou et al. (1992) Journal of Controlled Release, 19:269-274).

[0162] One major type of liposomal composition includes phospholipids other than naturally derived phosphatidylcholine. Neutral liposome compositions, for example, can be formed from dimyristoyl phosphatidylcholine (DMPC) or dipalmitoyl phosphatidylcholine (DPPC). Anionic liposome compositions generally are formed from dimyristoyl phosphatidylglycerol, while anionic fusogenic liposomes are formed primarily from dioleoyl phosphatidylethanolamine (DOPE). Another type of liposomal composition is formed from phosphatidylcholine (PC) such as, for example, soybean PC, and egg PC. Another type is formed from mixtures of phospholipid and/or phosphatidylcholine and/or cholesterol.

[0163] Examples of other methods to introduce liposomes into cells in vitro and in vivo include U.S. Pat. Nos. 5,283,185; 5,171,678; WO 94/00569; WO 93/24640; WO 91/16024; Feigner, (1994) J. Biol. Chem. 269:2550; Nabel, (1993) Proc. Natl. Acad. Sci. 90:11307; Nabel, (1992) Human Gene Ther. 3:649; Gershon, (1993) Biochem. 32:7143; and Strauss, (1992) EMBO J. 11:417.

[0164] Non-ionic liposomal systems have also been examined to determine their utility in the delivery of drugs to the skin, in particular systems comprising non-ionic surfactant and cholesterol. Non-ionic liposomal formulations comprising NOVASOME™ I (glyceryl dilaurate/cholesterol/polyoxyethylene-10-stearyl ether) and NOVASOME™ II (glyceryl distearate/cholesterol/polyoxyethylene-10-stearyl ether) were used to deliver cyclosporin-A into the dermis of mouse skin. Results indicated that such non-ionic liposomal systems were effective in facilitating the deposition of cyclosporine A into different layers of the skin (Hu et al., (1994) S.T.P. Pharma. Sci., 4(6):466).

[0165] Liposomes may also be sterically stabilized liposomes, comprising one or more specialized lipids that result in enhanced circulation lifetimes relative to liposomes lacking such specialized lipids. Examples of sterically stabilized liposomes are those in which part of the vesicle-forming lipid portion of the liposome (A) comprises one or more glycolipids, such as monosialoganglioside G_{M1}, or (B) is derivatized with one or more hydrophilic polymers, such as a polyethylene glycol (PEG) moiety. While not wishing to be bound by any particular theory, it is thought in the art that, at least for sterically stabilized liposomes containing gangliosides, sphingomyelin, or PEG-derivatized lipids, the enhanced circulation half-life of these sterically stabilized liposomes derives from a reduced uptake into cells of the reticuloendothelial system (RES) (Allen et al., (1987) FEBS Letters, 223:42; Wu et al., (1993) Cancer Research, 53:3765).

[0166] Various liposomes comprising one or more glycolipids are known in the art. Papahadjopoulos et al. (Ann. N.Y. Acad. Sci., (1987), 507:64) reported the ability of monosialoganglio side G^{M1}, galactocerebroside sulfate, and phosphatidylinositol to improve blood half-lives of liposomes. These findings were expounded upon by Gabizon et al. (Proc. Natl. Acad. Sci. U.S.A., (1988), 85:6949). U.S. Pat. No. 4,837,028 and WO 88/04924, both to Allen et al., disclose liposomes comprising (1) sphingomyelin and (2) the ganglioside G_{M1} or a galactocerebroside sulfate ester. U.S. Pat. No. 5,543,152 (Webb et al.) discloses liposomes comprising sphingomyelin. Liposomes comprising 1,2-sn-dimyristoylphosphatidylcholine are disclosed in WO 97/13499 (Lim et al).

[0167] In one embodiment, cationic liposomes are used. Cationic liposomes possess the advantage of being able to fuse to the cell membrane. Non-cationic liposomes, although not able to fuse as efficiently with the plasma membrane, are taken up by macrophages in vivo and can be used to deliver oligonucleotides to macrophages.

[0168] Further advantages of liposomes include: liposomes obtained from natural phospholipids are biocompatible and biodegradable; liposomes can incorporate a wide range of water and lipid soluble drugs; liposomes can protect encapsulated oligonucleotides in their internal compartments from metabolism and degradation (Rosoff, in “Pharmaceutical Dosage Forms,” Lieberman, Rieger and Banker (Eds.), 1988, volume 1, p. 245). Important considerations in the preparation of liposome formulations are the lipid surface charge, vesicle size and the aqueous volume of the liposomes.

[0169] A positively-charged synthetic cationic lipid, N-[1-(2,3-dioleyloxy)propyl]-N,N,N-trimethylammonium chloride (DOTMA) can be used to form small liposomes that interact spontaneously with nucleic acid to form lipid-nucleic acid complexes which are capable of fusing with the negatively charged lipids of the cell membranes of tissue culture cells, resulting in delivery of oligonucleotide (see, e.g., Feigner, P. L. et al., (1987) Proc. Natl. Acad. Sci. USA 8:7413-7417, and U.S. Pat. No. 4,897,355 for a description of DOTMA and its use with DNA).

[0170] A DOTMA analogue, 1,2-bis(oleoyloxy)-3-(trimethylammonia)propane (DOTAP) can be used in combination with a phospholipid to form DNA-complexing vesicles. LIPOFECTIN™ Bethesda Research Laboratories, Gaithersburg, Md.) is an effective agent for the delivery of highly anionic nucleic acids into living tissue culture cells that comprise positively-charged DOTMA liposomes which interact spontaneously with negatively charged polynucleotides to form complexes. When enough positively-charged liposomes are used, the net charge on the resulting complexes is also positive. Positively-charged complexes prepared in this way spontaneously attach to negatively charged cell surfaces, fuse with the plasma membrane, and efficiently deliver functional nucleic acids into, for example, tissue culture cells. Another commercially available cationic lipid, 1,2-bis(oleoyloxy)-3,3-(trimethylammonia)propane (“DOTAP”) (Boehringer Mannheim, Indianapolis, Ind.) differs from DOTMA in that the oleoyl moieties are linked by ester, rather than ether linkages.

[0171] Other reported cationic lipid compounds include those that have been conjugated to a variety of moieties including, for example, carboxyspermine which has been conjugated to one of two types of lipids and includes compounds such as 5-carboxyspermylglycine dioctaoleoylamide (“DOGS”) (TRANSFECTAM™, Promega, Madison, Wis.) and dipalmitoylphosphatidylethanolamine 5-carboxyspermyl-amide (“DPPES”) (see, e.g., U.S. Pat. No. 5,171,678).

[0172] Another cationic lipid conjugate includes derivatization of the lipid with cholesterol (“DC-Chol”) which has been formulated into liposomes in combination with DOPE (See, Gao, X. and Huang, L., (1991) Biochim. Biophys. Res. Commun. 179:280). Lipopolylysine, made by conjugating polylysine to DOPE, has been reported to be effective for transfection in the presence of serum (Zhou, X. et al., (1991) Biochim. Biophys. Acta 1065:8). For certain cell lines, these liposomes containing conjugated cationic lipids, are said to exhibit lower toxicity and provide more efficient transfection than the DOTMA-containing compositions. Other commercially available cationic lipid products include DMRIE and DMRIE-HP (Vical, La Jolla, Calif.) and Lipofectamine (DOSPA) (Life Technology, Inc., Gaithersburg, Md.). Other cationic lipids suitable for the delivery of oligonucleotides are described in WO 98/39359 and WO 96/37194.

[0173] Liposomal formulations are particularly suited for topical administration, liposomes present several advantages over other formulations. Such advantages include reduced side effects related to high systemic absorption of the administered drug, increased accumulation of the administered drug at the desired target, and the ability to administer oligonucleotide into the skin. In some implementations, liposomes are used for delivering oligonucleotide to epidermal cells and also to enhance the penetration of oligonucleotide into dermal tissues, e.g., into skin. For example, the liposomes can be applied topically. Topical delivery of drugs formulated as liposomes to the skin has been documented (see, e.g., Weiner et al., (1992) Journal of Drug Targeting, vol. 2,405-410 and du Plessis et al., (1992) Antiviral Research, 18:259-265; Mannino, R. J. and Fould-Fogerite, S., (1998) Biotechniques 6:682-690; Itani, T. et al., (1987) Gene 56:267-276; Nicolau, C. et al. (1987) Meth. Enzymol. 149:157-176; Straubinger, R. M. and Papahadjopoulos, D. (1983) Meth. Enzymol. 101:512-527; Wang, C. Y. and Huang, L., (1987) Proc. Natl. Acad. Sci. USA 84:7851-7855).

[0174] Non-ionic liposomal systems have also been examined to determine their utility in the delivery of drugs to the skin, in particular systems comprising non-ionic surfactant and cholesterol. Non-ionic liposomal formulations comprising NOVASOME I (glyceryl dilaurate/cholesterol/polyoxyethylene-10-stearyl ether) and NOVASOME II (glyceryl distearate/cholesterol/polyoxyethylene-10-stearyl ether) were used to deliver a drug into the dermis of mouse skin. Such formulations with oligonucleotides are useful for treating a dermatological disorder.

[0175] The targeting of liposomes is also possible based on, for example, organ-specificity, cell-specificity, and organelle-specificity and is known in the art. In the case of a liposomal targeted delivery system, lipid groups can be incorporated into the lipid bilayer of the liposome in order to maintain the targeting ligand in stable association with the liposomal bilayer. Various linking groups can be used for joining the lipid chains to the targeting ligand. Additional methods are known in the art and are described, for example in U.S. Patent Application Publication No. 20060058255, the linking groups of which are herein incorporated by reference.

[0176] Liposomes that include oligonucleotides can be made highly deformable. Such deformability can enable the liposomes to penetrate through pore that are smaller than the average radius of the liposome. For example, transfersomes are yet another type of liposomes, and are highly deformable lipid aggregates which are attractive candidates for drug delivery vehicles. Transfersomes can be described as lipid droplets which are so highly deformable that they are easily able to penetrate through pores which are smaller than the droplet. Transfersomes can be made by adding surface edge activators, usually surfactants, to a standard liposomal composition. Transfersomes that include oligonucleotides can be delivered, for example, subcutaneously by infection in order to deliver oligonucleotides to keratinocytes in the skin. In order to cross intact mammalian skin, lipid vesicles must pass through a series of fine pores, each with a diameter less than 50 nm, under the influence of a suitable transdermal gradient. In addition, due to the lipid properties, these transfersomes can be self-optimizing (adaptive to the shape of pores, e.g., in the skin), self-repairing, and can frequently reach their targets without fragmenting, and often self-loading. Transfersomes have been used to deliver serum albumin to the skin. The transfersome-mediated delivery of serum albumin has been shown to be as effective as subcutaneous injection of a solution containing serum albumin.

[0177] Other formulations amenable to the present disclosure are described in PCT Publication Nos. WO 2009/088891, WO 2009/132131, and WO 2008/042973, which are hereby incorporated by reference in their entirety.

[0178] Surfactants find wide application in formulations such as emulsions (including microemulsions) and liposomes. The most common way of classifying and ranking the properties of the many different types of surfactants, both natural and synthetic, is by the use of the hydrophile/lipophile balance (HLB). The nature of the hydrophilic group (also known as the “head”) provides the most useful means for categorizing the different surfactants used in formulations (Rieger, in Pharmaceutical Dosage Forms, Marcel Dekker, Inc., New York, N.Y., 1988, p. 285).

[0179] If the surfactant molecule is not ionized, it is classified as a nonionic surfactant. Nonionic surfactants find wide application in pharmaceutical and cosmetic products and are usable over a wide range of pH values. In general, their HLB values range from 2 to about 18 depending on their structure. Nonionic surfactants include nonionic esters such as ethylene glycol esters, propylene glycol esters, glyceryl esters, polyglyceryl esters, sorbitan esters, sucrose esters, and ethoxylated esters. Nonionic alkanolamides and ethers such as fatty alcohol ethoxylates, propoxylated alcohols, and ethoxylated/propoxylated block polymers are also included in this class. The polyoxyethylene surfactants are the most popular members of the nonionic surfactant class.

[0180] If the surfactant molecule carries a negative charge when it is dissolved or dispersed in water, the surfactant is classified as anionic. Anionic surfactants include carboxylates such as soaps, acyl lactylates, acyl amides of amino acids, esters of sulfuric acid such as alkyl sulfates and ethoxylated alkyl sulfates, sulfonates such as alkyl benzene sulfonates, acyl isethionates, acyl taurates and sulfosuccinates, and phosphates. The most important members of the anionic surfactant class are the alkyl sulfates and the soaps.

[0181] If the surfactant molecule carries a positive charge when it is dissolved or dispersed in water, the surfactant is classified as cationic. Cationic surfactants include quaternary ammonium salts and ethoxylated amines. The quaternary ammonium salts are the most used members of this class.

[0182] If the surfactant molecule has the ability to carry either a positive or negative charge, the surfactant is classified as amphoteric. Amphoteric surfactants include acrylic acid derivatives, substituted alkylamides, N-alkylbetaines, and phosphatides.

[0183] The use of surfactants in drug products, formulations and in emulsions has been reviewed (Rieger, in Pharmaceutical Dosage Forms, Marcel Dekker, Inc., New York, N.Y., 1988, p. 285).

[0184] The oligonucleotides for use in the methods of the disclosure can also be provided as micellar formulations. Micelles are a particular type of molecular assembly in which amphipathic molecules are arranged in a spherical structure such that all the hydrophobic portions of the molecules are directed inward, leaving the hydrophilic portions in contact with the surrounding aqueous phase. The converse arrangement exists if the environment is hydrophobic.

### Lipid Nanoparticle-Based Delivery Methods

[0185] Oligonucleotides of in the disclosure may be fully encapsulated in a lipid formulation, e.g., a lipid nanoparticle (LNP), or other nucleic acid-lipid particle. LNPs are useful for systemic applications, as they exhibit extended circulation lifetimes following intravenous (i.v.) injection and accumulate at distal sites (e.g., sites physically separated from the administration site). LNPs include “pSPLP,” which include an encapsulated condensing agent-nucleic acid complex as set forth in PCT Publication No. WO 00/03683. The particles of the present disclosure typically have a mean diameter of about 50 nm to about 150 nm, more typically about 60 nm to about 130 nm, more typically about 70 nm to about 110 nm, most typically about 70 nm to about 90 nm, and are substantially nontoxic. In addition, the nucleic acids when present in the nucleic acid-lipid particles of the present disclosure are resistant in aqueous solution to degradation with a nuclease. Nucleic acid-lipid particles and their method of preparation are disclosed in, e.g., U.S. Pat. Nos. 5,976,567; 5,981,501; 6,534,484; 6,586,410; 6,815,432; U.S. Publication No. 2010/0324120 and PCT Publication No. WO 96/40964.

[0186] Non-limiting examples of cationic lipids include N,N-dioleyl-N,N-dimethylammonium chloride (DODAC), N,N-distearyl-N,N-dimethylammonium bromide (DDAB), N-(I-(2,3-dioleoyloxy)propyl)-N,N,N-trimethylammonium chloride (DOTAP), N-(I-(2,3-dioleyloxy)propyl)-N,N,N-trimethylammonium chloride (DOTMA), N,N-dimethyl-2,3-dioleyloxy)propylamine (DODMA), 1,2-DiLinoleyloxy-N,N-dimethylaminopropane (DLinDMA), 1,2-Dilinolenyloxy-N,N-dimethylaminopropane (DLenDMA), 1,2-Dilinoleylcarbamoyloxy-3-dimethylaminopropane (DLin-C-DAP), 1,2-Dilinoleyoxy-3-(dimethylamino)acetoxypropane (DLin-DAC), 1,2-Dilinoleyoxy-3-morpholinopropane (DLin-MA), 1,2-Dilinoleoyl-3-dimethylaminopropane (DLinDAP), 1,2-Dilinoleylthio-3-dimethylaminopropane (DLin-S-DMA), 1-Linoleoyl-2-linoleyloxy-3-dimethylaminopropane (DLin-2-DMAP), 1,2-Dilinoleyloxy-3-trimethylaminopropane chloride salt (DLin-TMA.Cl), 1,2-Dilinoleoyl-3-trimethylaminopropane chloride salt (DLin-TAP.Cl), 1,2-Dilinoleyloxy-3-(N-methylpiperazino)propane (DLin-MPZ), or 3-(N,N-Dilinoleylamino)-1,2-propanediol (DLinAP), 3-(N,N-Dioleylamino)-1,2-propanedio (DOAP), 1,2-Dilinoleyloxo-3-(2-N,N-dimethylamino)ethoxypropane (DLin-EG-DMA), 1,2-Dilinolenyloxy-N,N-dimethylaminopropane (DLinDMA), 2,2-Dilinoleyl-4-dimethylaminomethyl-[1,3]-dioxolane (DLin-K-DMA) or analogs thereof, (3aR,5s,6aS)—N,N-dimethyl-2,2-di((9Z,12Z)-octadeca-9,12-dienyetetrahydro-3aH-cyclopenta[d][1,3]dioxol-5-amine (ALN100), (6Z,9Z,28Z,31Z)-heptatriaconta-6,9,28,31-tetraen-19-yl4-(dimethylamino)bu-tanoate (MC3), 1,1′-(2-(4-(2-((2-(bis(2-hydroxydodecyl)amino)ethyl)(2-hydroxydodecyl)ami-no)ethyl)piperazin-1-yeethylazanediyedidodecan-2-ol (Tech G1), or a mixture thereof. The cationic lipid can comprise, for example, from about 20 mol % to about 50 mol % or about 40 mol % of the total lipid present in the particle.

[0187] The ionizable/non-cationic lipid can be an anionic lipid or a neutral lipid including, but not limited to, distearoylphosphatidylcholine (DSPC), dioleoylphosphatidylcholine (DOPC), dipalmitoylphosphatidylcholine (DPPC), dioleoylphosphatidylglycerol (DOPG), dipalmitoylphosphatidylglycerol (DPPG), dioleoyl-phosphatidylethanolamine (DOPE), palmitoyloleoylphosphatidylcholine (POPC), palmitoyloleoylphosphatidylethanolamine (POPE), dioleoyl-phosphatidylethanolamine 4-(N-maleimidomethyl)-cyclohexane-1-carboxylate (DOPE-mal), dipalmitoyl phosphatidyl ethanolamine (DPPE), dimyristoylphosphoethanolamine (DMPE), distearoyl-phosphatidyl-ethanolamine (DSPE), 16-O-monomethyl PE, 16-O-dimethyl PE, 18-1-trans PE, 1-stearoyl-2-oleoyl-phosphatidyethanolamine (SOPE), cholesterol, or a mixture thereof. The non-cationic lipid can be, for example, from about 5 mol % to about 90 mol %, about 10 mol %, or about 60 mol % if cholesterol is included, of the total lipid present in the particle.

[0188] The conjugated lipid that inhibits aggregation of particles can be, for example, a polyethyleneglycol (PEG)-lipid including, without limitation, a PEG-diacylglycerol (DAG), a PEG-dialkyloxypropyl (DAA), a PEG-phospholipid, a PEG-ceramide (Cer), or a mixture thereof. The PEG-DAA conjugate can be, for example, a PEG-dilauryloxypropyl (C₁₂), a PEG-dimyristyloxypropyl (C₁₄), a PEG-dipalmityloxypropyl (C₁₆), or a PEG-distearyloxypropyl (Cis). The conjugated lipid that prevents aggregation of particles can be, for example, from 0 mol % to about 20 mol % or about 2 mol % of the total lipid present in the particle.

[0189] In some embodiments, the nucleic acid-lipid particle further includes cholesterol at, e.g., about 10 mol % to about 60 mol % or about 50 mol % of the total lipid present in the particle.

[0190] The ASO may also be deliver in a lipidoid. The synthesis of lipidoids has been extensively described and formulations containing these compounds are particularly suited for delivery of modified nucleic acid molecules or ASOs (see Mahon et al, Bioconjug Chem. 2010 21: 1448-1454; Schroeder et al, J Intern Med. 2010 267:9-21; Akinc et al, Nat Biotechnol. 2008 26:561-569; Love et al, Proc Natl Acad Sci USA. 2010 107: 1864-1869; Siegwart et al, Proc Natl Acad Sci USA. 2011 108: 12996-3001; all of which are incorporated herein in their entireties).

[0191] Lipid compositions for RNA delivery are disclosed in WO2012170930A1, WO2013149141A1, and WO2014152211A1, each of which are hereby incorporated by reference.

### IV. Therapeutic Applications

[0192] The present disclosure provides methods for treating diseases and disorders associated with decreased GRN gene expression and other diseases and disorders. In some embodiments, the methods employ ASOs that hybridize with GRN regRNAs transcribed from a regulatory element of the GRN gene or a pharmaceutical composition comprising the ASO. The oligonucleotide compositions described herein are useful in the methods of the disclosure and, while not bound by theory, are believed to exert their desirable effects through their ability to modulate the level of PGRN protein (and its GRN peptide proteolytic products) and/or GRN mRNA, and/or the status or activity of GRN (e.g., by increasing the level of the PGRN protein in a cell in a subject (e.g., a mammal, a mouse, a hamster, a non-human primate (e.g., a monkey), or a human)).

[0193] An aspect of the present disclosure relates to methods of treating disorders related to GRN (e.g., a GRN-related disorder) in a subject in need thereof, including administering an ASO of the disclosure (or a pharmaceutical composition including the ASO) to thereby increase the expression of GRN in a cell of the subject. In some embodiments, the GRN-related disorder is frontotemporal dementia (FTD) (e.g., GRN-FTD, also known as FTD-GRN) or frontotemporal lobar degeneration (e.g., GRN-related frontotemporal lobar degeneration). In some embodiments, the subject comprises a progranulin haploinsufficiency.

[0194] Another aspect of the present disclosure relates to methods of treating a disease or disorder (e.g., a disease or disorder provided herein) in a subject in need thereof, including administering an ASO of the disclosure (or a pharmaceutical composition including the ASO), thereby treating the disease or the disorder in the subject. In some embodiments, the disease or disorder is selected from frontotemporal dementia (FTD), frontotemporal lobar degeneration (FTLD), neuroinflammation, myopathy, familial frontotemporal dementia with neuropathologic frontotemporal lobal degeneration associated with accumulation of TDP-43 inclusions (FTLD-TDP), Down syndrome, Huntington's disease, hippocampal sclerosis dementia, spinocerebellar ataxia 3, chronic traumatic encephalopathy, Alzheimer's disease (AD), amyotrophic lateral sclerosis (ALS), Gaucher disease (GD) and Parkinson's disease (PD), neuronal ceroid lipofuscinosis (NCL) type 11 (CLN11), limbic-predominant age-related TDP-43 encephalopathy (LATE), autism, ischemia-reperfusion injury in the brain, a lysosomal storage disease (LSD), rheumatoid arthritis (RA), inflammatory bowel disease (IBD), multiple sclerosis (MS), ischemic heart disease, intervertebral disc ceneration, and acute kidney injury. In some embodiments, the disease or disorder is a LSD selected from a sphingolipidosis disorder (e.g., GM2 gangliosidosis, Type A (also known as Tay Sachs disease); GM2 gangliosidosis, Type O (also known as Sandhoff disease); GM2 gangliosidosis, Type AB (also known as GM2 activator deficiency); Niemann-Pick disease (e.g., Niemann-Pick disease, Type A; Niemann-Pick disease, Type B; Niemann-Pick disease, Type C; Neimann-Pick disease, Type D; Neimann-Pick disease, Type E; and Neimann-Pick disease, Type F); Gaucher's disease (e.g., Gaucher's disease type 1; Gaucher's disease type 2; and Gaucher's disease type 3); Fabry disease (also known as Anderson-Fabry disease) (e.g., classic Fabry disease and late-onset Fabry Disease); metachromatic leukodystrophy; globoid leukodystrophy (also known as Krabbe disease); GM1 gangliosidosis (e.g., GM1 gangliosidosis Type 1, GM1 gangliosidosis Type 2, and GM1 gangliosidosis Type 3); and multiple sulfatase deficiency); an oligosaccharidosis disorder (e.g., alfa mannosidosis, Schindler disease, aspartylglucosaminuria, and Fucosidosis); a mucopolysaccharidosis (MPS) (e.g., Hurler syndrome, Scheie syndrome, Hurler-Scheie syndrome, Hunter syndrome, Sanfilippo syndrome (e.g., Sanfilippo syndrome Type A, Sanfilippo syndrome Type B, Sanfilippo syndrome Type C, and Sanfilippo syndrome Type D), Morquio syndrome (e.g., Morquio syndrome Type A and Morquio syndrome Type B), Maroteaux-Lamy syndrome, and Sly syndrome; a neuronal ceroid lipofuscinoses (NCLs; also known as Batten disease) (e.g., CLN1, CLN2, CLN3, CLN4, CLN5, CLN6, CLN7, CLN8, CLN9, CLN10, CLN11, CLN12, CLN13, and CLN 14); a sialic acid disorder (e.g., galactosialidosis, infantile sialic acid storage disease, Salla disease, and sialuria); a mucolipidosis (e.g., sialidosis I, sialidosis II, I-cell disease, Pseudo-Hurler-polydystrophy, and mucolipidosis IV); lysosomal acid lipase deficiency, Pompe disease, Danon disease, and cystinosis. Lysosomal storage diseases are generally described in Rajkumar and Dumpa, “Lysosomal Storage Disease,” In: StatPearls [Internet]. Treasure Island (FL): StatPearls Publishing; 2023 January, available at: ncbi.nlm.nih.gov/books/NBK563270/, hereby incorporated by reference in its entirety.

[0195] Another aspect of the disclosure includes methods of increasing the level of PGRN protein or GRN mRNA in a cell of a subject (e.g., a subject identified as having a GRN-related disorder or any other disease or disorder provided herein), including contacting the cell of the subject with an ASO of the disclosure (or a pharmaceutical composition including the ASO) to thereby increase the level of PGRN protein or GRN mRNA in the cell of the subject.

[0196] Another aspect of the disclosure includes methods of increasing the expression of a GRN gene in a cell of a subject (e.g., a subject having a disease or disorder described herein) comprising administering an ASO of the disclosure (or a pharmaceutical composition including the ASO) to thereby increase the expression of a GRN gene in a cell of the subject.

[0197] Another aspect of the present disclosure relates to methods of treating a disease or disorder in a subject in need thereof, comprising administering an ASO of the disclosure (or a pharmaceutical composition including the ASO), thereby treating the disease or disorder in the subject.

[0198] Still another aspect of the present disclosure includes methods of increasing expression of GRN in a cell in a subject, comprising administering an ASO of the disclosure (or a pharmaceutical composition including the ASO), thereby treating the disease or disorder in the subject.

[0199] In yet another aspect, the disclosure provides for an ASO of the disclosure (or a pharmaceutical composition including the ASO) for use as a medicament. Further, the disclosure provides for an ASO of the disclosure (or a pharmaceutical composition including the ASO) for use in therapy.

[0200] Yet another aspect of the disclosure includes methods of modulating (e.g., increasing or reducing) expression of a GRN gene in a cell (e.g., in vivo, ex vivo, or in vitro) including contacting the cell with an ASO of the disclosure (or a pharmaceutical composition including the ASO), thereby increasing the expression of a GRN gene in the cell. In some embodiments, the cell is a human cell or a mammalian cell. The methods may include contacting a cell with an ASO of the disclosure (or a pharmaceutical composition including the ASO), in an amount effective to modulate (e.g., increase) expression of GRN in the cell, thereby increasing expression of PGRN protein or GRN mRNA in the cell. In some embodiments, contacting the cell with the ASO (or a pharmaceutical composition including the ASO) modulates (e.g., increases) the amount of GRN mRNA in the cell. In some embodiments, contacting the cell with the ASO (or a pharmaceutical composition including the ASO) modulates (e.g., increases) the amount of PGRN protein in the cell.

[0201] Based on the above methods, further aspects of the present disclosure include an oligonucleotide of the disclosure, or a composition comprising such an oligonucleotide, for use in therapy, or for use as a medicament, or for use in treating a disease or disorder (e.g., a GRN-related disorder or FTD) in a subject in need thereof, or for use in increasing the level of PGRN in a cell of a subject (e.g., a subject identified as having a GRN-related disorder), or for use in increasing expression of GRN in a cell in a subject. The uses include the contacting of a cell with the oligonucleotide, in an amount effective to increase expression of GRN in the cell, thereby increasing expression of GRN in the cell. Embodiments described below in relation to the methods of the disclosure are also applicable to these further aspects.

[0202] Contacting of a cell with an ASO may be performed in vitro, ex vivo, or in vivo. Contacting a cell in vivo with the ASO includes contacting a cell or group of cells within a subject, e.g., a human subject, with the oligonucleotide. Combinations of in vitro, ex-vivo, and in vivo methods of contacting a cell are also possible. Contacting a cell may be direct or indirect, as discussed above. Furthermore, contacting a cell may be accomplished via a targeting ligand, including any ligand described herein or known in the art. In some embodiments, the targeting ligand is a carbohydrate moiety, e.g., a GalNAc3 ligand, or any other ligand that directs the oligonucleotide to a site of interest. The cell can be a CNS cell, for example a neuron or a brain cell, a microglial cell.

[0203] Administration of the ASOs or pharmaceutical compositions disclosed herein to a subject can be intravenous, intraarterial, intraperitoneal, intramuscular, subcutaneous, intrapleural, intrathecal, intracavitary, by perfusion through a catheter or by direct intralesional injection. In certain embodiments, the ASO or pharmaceutical composition is administered systemically. In certain embodiments, the ASO or pharmaceutical composition is administered by a parenteral route. For example, in certain embodiments, the ASO or pharmaceutical composition is administered intravenously (e.g., by intravenous infusion), for example, with a prefilled bag, a prefilled pen, or a prefilled syringe. In other embodiments, the ASO or pharmaceutical composition is administered locally to an organ or tissue in which an increase in the target gene expression is desirable (e.g., liver or brain tissue (e.g., cortex, hypothalamus, hippocampus, cerebellum, and coronal brain tissue)).

[0204] In some embodiments, the oligonucleotide is administered to a subject such that the oligonucleotide is delivered to a specific site within the subject. Such targeted delivery can be achieved by either systemic administration or local administration. The increase of expression of GRN may be assessed using measurements of the level or change in the level of GRN mRNA or PGRN protein in a sample (e.g., blood, tissue or CNS sample) derived from a specific site within the subject. In certain embodiments, the methods include a clinically relevant increase of expression of GRN, e.g., as demonstrated by a clinically relevant outcome after treatment of a subject with an agent to reduce the expression of GRN.

[0205] In other embodiments, the oligonucleotide is administered in an amount and for a time effective to result in a reduction (e.g., by 10%, 20%, 30%, 40%, 50%, 60%, 70%, 80%, 90%, or 100%) of one or more symptoms of a disease or disorder (e.g., a GRN-related disorder), such as deterioration in behavior or personality, language impairment, disturbances or alterations in muscle or motor function, memory loss, cognitive dysfunction, tremor, seizures, and dizziness.

### Increase of GRN Expression Level

[0206] In some embodiments, the therapeutic methods disclosed herein, using an ASO that targets a GRN regRNA, are designed to increase GRN expression in a subject. Increasing expression of a GRN gene includes any level of increasing of a GRN gene, e.g., at least a partial increase of the expression of a GRN gene. Increased expression may be assessed by an increase in an absolute or relative level of one or more of these variables compared with a control level. The control level may be any type of control level that is utilized in the art, e.g., a pre-dose baseline level, or a level determined from a similar subject, cell, or sample that is untreated or treated with a control (such as, e.g., buffer-only (vehicle) control or inactive agent control). In certain embodiments, the method causes a clinically relevant increase of expression of GRN, e.g., as demonstrated by a clinically relevant outcome after treatment of a subject with an agent to increase the expression of GRN.

[0207] In certain embodiments, the method disclosed herein increases GRN gene expression by at least about 1%, at least about 2%, at least about 5%, at least about 10%, at least about 15%, at least about 20%, at least about 25%, at least about 30%, at least about 35%, at least about 40%, at least about 45%, at least about 50%, at least about 55%, at least about 60%, at least about 65%, at least about 70%, at least about 75%, at least about 80%, at least about 85%, at least about 90%, at least about 91%, at least about 92%, at least about 93%, at least about 94%, at least about 95%, at least about 96%, at least about 97%, at least about 98%, or at least about 99%, relative to the pre-dose, pre-administration, or pre-exposure baseline level. In certain embodiments, the method disclosed herein increases GRN gene expression by at least 1-fold, at least 2-fold, at least 3-fold, at least 4-fold, at least 5-fold, at least 6-fold, at least 7-fold, at least 8-fold, at least 9-fold, or at least 10-fold or more, relative to the pre-dose, pre-administration, or pre-exposure baseline level. In certain embodiments, the subject has a deficiency in GRN expression, and the method disclosed herein restores the GRN expression level or activity to at least 20%, at least 30%, at least 40%, at least 50%, at least 60%, at least 70%, at least 80%, at least 90%, or at least 100% of the average GRN expression level or activity in subjects of the species of like age and gender.

[0208] In some embodiments, an ASO of the disclosure may enhance the production of GRN mRNA (e.g., in a cell or in a cell, tissue, or sample of a subject) by at least about 1%, at least about 2%, at least about 5%, at least about 10%, at least about 15%, at least about 20%, at least about 25%, at least about 30%, at least about 35%, at least about 40%, at least about 45%, at least about 50%, at least about 55%, at least about 60%, at least about 65%, at least about 70%, at least about 75%, at least about 80%, at least about 85%, at least about 90%, at least about 91%, at least about 92%, at least about 93%, at least about 94%, at least about 95%, at least about 96%, at least about 97%, at least about 98%, or at least about 99%, at least about 100%, at least about 150%, at least about 200%, at least about 250%, at least about 300%, at least about 350%, at least about 400%, at least about 500%, at least about 600%, at least about 700%, at least about 800%, at least about 900% or more, relative to the pre-dose, pre-administration, or pre-exposure baseline level. In some embodiments, an ASO of the disclosure may enhance the production of GRN mRNA (e.g., in a cell or in a cell, tissue, or sample of a subject) by at least 1-fold, at least 2-fold, at least 3-fold, at least 4-fold, at least 5-fold, at least 6-fold, at least 7-fold, at least 8-fold, at least 9-fold, or at least 10-fold or more, relative to the pre-dose, pre-administration, or pre-exposure baseline level.

[0209] In some embodiments, an ASO of the disclosure may enhance the production of PGRN protein (e.g., in a cell or in a cell, tissue, or sample of a subject) by at least about 1%, at least about 2%, at least about 5%, at least about 10%, at least about 15%, at least about 20%, at least about 25%, at least about 30%, at least about 35%, at least about 40%, at least about 45%, at least about 50%, at least about 55%, at least about 60%, at least about 65%, at least about 70%, at least about 75%, at least about 80%, at least about 85%, at least about 90%, at least about 91%, at least about 92%, at least about 93%, at least about 94%, at least about 95%, at least about 96%, at least about 97%, at least about 98%, or at least about 99%, at least about 100%, at least about 150%, at least about 200%, at least about 250%, at least about 300%, at least about 350%, at least about 400%, at least about 500%, at least about 600%, at least about 700%, at least about 800%, at least about 900% or more, relative to the pre-dose, pre-administration, or pre-exposure baseline level. In some embodiments, an ASO of the disclosure may enhance the production of PGRN protein (e.g., in a cell or in a cell, tissue, or sample of a subject) by at least 1-fold, at least 2-fold, at least 3-fold, at least 4-fold, at least 5-fold, at least 6-fold, at least 7-fold, at least 8-fold, at least 9-fold, or at least 10-fold or more, relative to the pre-dose, pre-administration, or pre-exposure baseline level.

[0210] The expression of a GRN gene may be assessed based on the level of any variable associated with GRN gene expression, e.g., GRN mRNA level or PGRN protein levels. In certain embodiments, the expression level or activity of GRN herein refers to the average expression level or activity in neuron cells or the brain (e.g., brain cells of a brain region described herein).

[0211] In certain embodiments, surrogate markers can be used to detect an increase of GRN expression level. For example, effective treatment of a GRN-related disorder, as demonstrated by acceptable diagnostic and monitoring criteria with an agent to increase GRN expression can be understood to demonstrate a clinically relevant increase in GRN.

[0212] Increase of the expression of a GRN gene may be manifested by an increase of the amount of GRN mRNA expressed by a first cell or group of cells (such cells may be present, for example, in a sample derived from a subject) in which a GRN gene is transcribed and which has or have been treated (e.g., by contacting the cell or cells with an oligonucleotide of the disclosure, or by administering an oligonucleotide of the disclosure to a subject in which the cells are or were present) such that the expression of a GRN gene is increased, as compared to a second cell or group of cells substantially identical to the first cell or group of cells but which has not or have not been so treated (control cell(s) not treated with an oligonucleotide or not treated with an oligonucleotide targeted to the gene of interest).

[0213] In other embodiments, increase of the expression of a GRN gene may be assessed in terms of an increase of a parameter that is functionally linked to GRN gene expression, e.g., PGRN protein expression, granulin peptide levels, or PGRN activity. An increase in GRN expression may be determined in any cell expressing GRN, either endogenous or heterologous from an expression construct, and by any assay known in the art.

[0214] An increase of GRN expression may be manifested by an increase in the level of the PGRN protein (or its proteolytic granulin peptide products) that is expressed by a cell or group of cells (e.g., the level of protein expressed in a sample derived from a subject), relative to a control cell or a control group of cells. An increase of GRN expression may also be manifested by an increase in the level of the GRN mRNA level in a treated cell or group of cells, relative to a control cell or a control group of cells.

[0215] A control cell or group of cells that may be used to assess the increase of the expression of a GRN gene includes a cell or group of cells that has not yet been contacted with an oligonucleotide of the disclosure. For example, the control cell or group of cells may be derived from an individual subject (e.g., a human or animal subject) prior to treatment of the subject with an oligonucleotide.

[0216] The level of GRN mRNA that is expressed by a cell or group of cells may be determined using any method known in the art for assessing mRNA expression. In one embodiment, the level of expression of GRN in a sample is determined by detecting a transcribed polynucleotide, or portion thereof, e.g., mRNA of the GRN gene. RNA may be extracted from cells using RNA extraction techniques including, for example, using acid phenol/guanidine isothiocyanate extraction (RNAzol™ B; Biogenesis), RNeasy™ RNA preparation kits (Qiagen) or PAXgene® (PreAnalytix, Switzerland). Typical assay formats utilizing ribonucleic acid hybridization include nuclear run-on assays, RT-PCR, RNase protection assays, northern blotting, in situ hybridization, and microarray analysis. Circulating GRN mRNA may be detected using methods described in PCT Publication WO 2012/177906, the entire contents of which are hereby incorporated herein by reference. In some embodiments, the level of expression of GRN is determined using a nucleic acid probe. The term “probe,” as used herein, refers to any molecule that is capable of selectively binding to a specific GRN or PGRN sequence, e.g., to an mRNA or polypeptide. Probes can be synthesized by one of skill in the art, or derived from appropriate biological preparations. Probes may be specifically designed to be labeled. Examples of molecules that can be utilized as probes include, but are not limited to, RNA, DNA, proteins, antibodies, and organic molecules.

[0217] In some embodiments, the therapeutic methods disclosed herein, using an ASO that targets a GRN regRNA, are designed to decrease an immune response gene expression level in a subject. Such immune response genes include, but are not limited to, cytokines and chemokines. Exemplary cytokines and chemokines are IL-8, IL-6, CCL4, and CCL2. In some embodiments, the GRN ASO reduces the expression of IL-8, IL-6, CCL4, and CCL2 in a cell or a subject.

[0218] Isolated mRNA can be used in hybridization or amplification assays that include, but are not limited to, Southern or northern analyses, polymerase chain reaction (PCR) analyses, and probe arrays. One method for the determination of mRNA levels involves contacting the isolated mRNA with a nucleic acid molecule (probe) that can hybridize to GRN mRNA. In one embodiment, the mRNA is immobilized on a solid surface and contacted with a probe, for example by running the isolated mRNA on an agarose gel and transferring the mRNA from the gel to a membrane, such as nitrocellulose. In an alternative embodiment, the probe(s) are immobilized on a solid surface and the mRNA is contacted with the probe(s), for example, in an AFFYMETRIX gene chip array. A skilled artisan can readily adapt known mRNA detection methods for use in determining the level of GRN mRNA.

[0219] An alternative method for determining the level of expression of GRN in a sample involves the process of nucleic acid amplification and/or reverse transcriptase (to prepare cDNA) of for example mRNA in the sample, e.g., by RT-PCR (the experimental embodiment set forth in Mullis, 1987, U.S. Pat. No. 4,683,202), ligase chain reaction (Barany (1991) Proc. Natl. Acad. Sci. USA 88:189-193), self-sustained sequence replication (Guatelli et al. (1990) Proc. Natl. Acad. Sci. USA 87:1874-1878), transcriptional amplification system (Kwoh et al. (1989) Proc. Natl. Acad. Sci. USA 86:1173-1177), Q-Beta Replicase (Lizardi et al. (1988) Bio/Technology 6:1197), rolling circle replication (Lizardi et al., U.S. Pat. No. 5,854,033) or any other nucleic acid amplification method, followed by the detection of the amplified molecules using techniques well known to those of skill in the art. These detection schemes are especially useful for the detection of nucleic acid molecules if such molecules are present in very low numbers. In particular aspects of the disclosure, the level of expression of GRN is determined by quantitative fluorogenic RT-PCR (i.e., the TAQMAN™ System) or the DUAL-GLO® Luciferase assay.

[0220] The expression levels of GRN mRNA may be monitored using a membrane blot (such as used in hybridization analysis such as northern, Southern, dot, and the like), or microwells, sample tubes, gels, beads or fibers (or any solid support comprising bound nucleic acids). See U.S. Pat. Nos. 5,770,722; 5,874,219; 5,744,305; 5,677,195; and 5,445,934, which are incorporated herein by reference. The determination of GRN expression level may also comprise using nucleic acid probes in solution.

[0221] In some embodiments, the level of GRN mRNA expression is assessed using branched DNA (bDNA) assays or real time PCR (qPCR). Such methods can also be used for the detection of GRN nucleic acids.

[0222] The level of PGRN protein expression and the level of granulin peptides may be determined using any method known in the art for the measurement of protein levels. Such methods include, for example, electrophoresis, capillary electrophoresis, high performance liquid chromatography (HPLC), thin layer chromatography (TLC), hyperdiffusion chromatography, fluid or gel precipitin reactions, absorption spectroscopy, a colorimetric assays, spectrophotometric assays, flow cytometry, immunodiffusion (single or double), immunoelectrophoresis, western blotting, radioimmunoassay (RIA), enzyme-linked immunosorbent assays (ELISAs), immunofluorescent assays, electrochemiluminescence assays, and the like. Such assays can also be used for the detection of proteins indicative of the presence of PGRN protein and granulin peptides.

### EXAMPLES

### Example 1: Synthesis and In Vitro Characterization of Human GRN regRNA-Targeting ASOs

[0223] Six GRN regRNAs were identified in the human genome, one paRNAs and five eRNAs. 177 steric ASOs were designed and synthesized targeting the GRN regRNAs. 29 ASOs were selected for tiling after first pass screening. 52 ASOs were designed and synthesized for fine tuning. Of these, 5 ASOS were gapmers, 27 had PO/PS bonds, 5 were mixmers, and 15 comprised LNAs.

[0224] To assess the expression of hGRN paRNA and mRNA in iPSC-derived neurons and iMGL cells, the following experiment was performed. Real time quantitative PCR (qPCR) was used to asses the expression of the hGRN paRNA and mRNA in these cells, following 24 hour exposure of the cells to the histone deacetylase (HDAC) inhibitor vorinostat (VOR) at either 1 uM or 3 uM, which is known to increase the expression of GRN mRNA. As control, cells were exposed to DMSO vehicle control. For this analysis, the qPCR reference gene was the geomean of GAPDH and PPIA, normalized to iPSC-dervied neurons treated with DMSO samples. n=3.

[0225] hGRN mRNA (FIG. 2A) and paRNA (FIG. 2B) was detected in iPSC-derived neurons and iMGL cells. hGRN mRNA and paRNA were 15- to 20-fold more abundant in microglia (iMGL cells) as compared to iPSC-derived neurons. Vorinostat treatment induced both hGRN mRNA and paRNA levels.

[0226] To detect whether hGRN paRNA was also expressed in human cortex tissue, a similar qPCR analysis was performed using human cortex tissue. As shown in FIG. 3, hGRN paRNA was detected in human cortex tissue.

[0227] To assess the ability of ASOs targeting hGRN paRNA to modulate the expression of human GRN mRNA, 110 ASOs targeting hGRN paRNA (− strand) were tested in the hepatocellular carcinoma cell lineHepG2. Briefly, HepG2 cells were transfected with 100 nM of the ASOs indicated in Table 2. 48 hours post-transfection, cells were collected for mRNA analysis via qPCR. The expression levels hGRN mRNA in cells treated with each ASOs is provided in Table 2.

TABLE 2

| | hGRN |
|---|---|
| ASO | mRNA |
| name | FC |
| CO-3413 | 0.9 |
| CO-3414 | 0.9 |
| CO-3415 | 1.0 |
| CO-3416 | 0.7 |
| CO-3417 | 0.7 |
| CO-3418 | 0.8 |
| CO-3419 | 0.9 |
| CO-3420 | 0.9 |
| CO-3421 | 0.8 |
| CO-3422 | 0.7 |
| CO-3423 | 1.2 |
| CO-3424 | 1.3 |
| CO-3425 | 1.1 |
| CO-3426 | 0.8 |
| CO-3427 | 1.0 |
| CO-3428 | 0.8 |
| CO-3429 | 0.9 |
| CO-3430 | 0.9 |
| CO-3431 | 0.5 |
| CO-3432 | 1.2 |
| CO-3433 | 0.7 |
| CO-3434 | 0.7 |
| CO-3435 | 0.6 |
| CO-3436 | 1.2 |
| CO-3437 | 0.8 |
| CO-3438 | 0.8 |
| CO-3439 | 0.7 |
| CO-3440 | 0.8 |
| CO-3441 | 0.7 |
| CO-3442 | 0.9 |
| CO-3443 | 1.1 |
| CO-3444 | 0.9 |
| CO-3445 | 0.8 |
| CO-3446 | 0.8 |
| CO-3447 | 0.7 |
| CO-3448 | 0.8 |
| CO-3449 | 1.1 |
| CO-3450 | 0.9 |
| CO-3451 | 0.9 |
| CO-3452 | 0.8 |
| CO-3453 | 0.9 |
| CO-3454 | 1.1 |
| CO-3455 | 0.9 |
| CO-3456 | 0.7 |
| CO-3457 | 0.9 |
| CO-3458 | 1.0 |
| CO-3459 | 1.2 |
| CO-3460 | 0.8 |
| CO-3461 | 0.7 |
| CO-3462 | 1.3 |
| CO-3463 | 1.6 |
| CO-3464 | 1.3 |
| CO-3465 | 0.8 |
| CO-3466 | 1.0 |
| CO-3467 | 1.2 |
| CO-3468 | 1.0 |
| CO-3469 | 1.0 |
| CO-3470 | 1.2 |
| CO-3471 | 0.8 |
| CO-3472 | 0.8 |
| CO-3473 | 1.0 |
| CO-3474 | 1.4 |
| CO-3475 | 1.1 |
| CO-3476 | 0.8 |
| CO-3477 | 0.8 |
| CO-3478 | 0.7 |
| CO-3479 | 1.0 |
| CO-3480 | 0.9 |
| CO-3481 | 1.4 |
| CO-3482 | 0.9 |
| CO-3483 | 0.9 |
| CO-3484 | 1.0 |
| CO-3485 | 0.9 |
| CO-3486 | 0.9 |
| CO-3487 | 0.8 |
| CO-3488 | 0.9 |
| CO-3489 | 1.0 |
| CO-3490 | 0.9 |
| CO-3491 | 0.9 |
| CO-3492 | 0.8 |
| CO-3493 | 1.0 |
| CO-3494 | 0.9 |
| CO-3495 | 0.9 |
| CO-3496 | 1.2 |
| CO-3497 | 1.3 |
| CO-3498 | 0.9 |
| CO-3499 | 0.8 |
| CO-3500 | 0.8 |
| CO-3501 | 0.8 |
| CO-3502 | 0.8 |
| CO-3503 | 1.5 |
| CO-3504 | 0.9 |
| CO-3505 | 0.9 |
| CO-3506 | 0.8 |
| CO-3507 | 0.8 |
| CO-3508 | 1.0 |
| CO-3509 | 1.2 |
| CO-3510 | 0.9 |
| CO-3511 | 1.1 |
| CO-3512 | 1.1 |
| CO-3513 | 1.7 |
| CO-3514 | 1.0 |
| CO-3515 | 1.0 |
| CO-3516 | 0.8 |
| CO-3517 | 1.2 |
| CO-3518 | 1.0 |
| CO-3519 | 0.8 |
| CO-3520 | 1.0 |
| CO-3521 | 1.3 |
| CO-3522 | 1.1 |

The best ASOs based on increased GRN mRNA fold-change were selected for further characterization in dose titration studies. Briefly, human neuroblastoma SK-N-AS cells were transfected with 20 to 160 nM of ASOs CO-3423, CO-3431, CO-3463, and CO-3503. A steric non-targeting control ASO (sNTC) was used as a control. Cells were collected for mRNA analysis after 48 hours and GRN mRNA quantified by qPCR. Housekeeping genes for normalization were GAPDH and PPIA, and mRNA fold change (FC) was normalized to sNTC. CO-3423 upregulated GRN mRNA by approximately 2.5-fold in a dose-dependent manner as compared to sNTC at the same dose (FIG. 4). CO-3431 downregulated GRN levels approximately 50%.

[0228] 36 additional ASOs were designed with different modifications and base walking around selected ASOs. The effect of increasing doses of these ASOs was assessed in the human neuroblastoma cell line SK-N-AS following transfection. Relative GRN mRNA levels in SK-N-AS cells after treatment was assessed 48-hours post-transfection, and data from exemplary ASOs is shown in FIGS. 5A and 5B.

[0229] Additional chemical modifications, including LNA, modifications were made to CO-3423. SK-N-AS cells were transfected with increasing concentrations of the LNA/PS modified ASOs and GRN mRNA quantified by qPCR. ASOs including different LNA modifications of CO-3423 had similar efficacy (i.e, similar increased GRN mRNA expression). The GRN mRNA fold-change induced by each ASO is shown in Table 3. GRN mRNA was normalized to the average fold-change of cells treated with two steric non-targeting control ASOs (CO-3772 and CO-1589 (sNTC1)).

TABLE 3

| ASO | | | |
|---|---|---|---|
| name | 30 nM FC | 60 nM FC | 120 nM FC |
| CO-3423 | 1.2 | 1.4 | 1.7 |
| CO-4113 | 1.6 | 2.0 | 2.3 |
| CO-4353 | 1.4 | 1.4 | 1.8 |
| CO-4354 | 1.6 | 1.9 | 1.9 |
| CO-4355 | 1.6 | 1.8 | 1.9 |
| CO-4356 | 1.6 | 1.8 | 2.2 |
| CO-4357 | 1.5 | 1.7 | 2.4 |
| CO-4358 | 1.5 | 1.9 | 2.0 |
| CO-4359 | 1.7 | 2.2 | 2.5 |
| CO-4360 | 1.4 | 1.8 | 2.5 |

[0230] The effect of ASO length on GRN gene expression modulation was also investigated. SK-N-AS cells were transfected with increasing concentrations of the longer ASOs and GRN mRNA quantified by qPCR. Increasing the length of CO-3423 increased the potency of the ASO, as shown in Table 4. mRNA was normalized to the average fold change of cells treated with two steric non-targeting control ASOs (CO-3772 and CO-1589 (sNTC1)).

TABLE 4

| ASO name | 30 nM FC | 60 nM FC | 120 nM FC |
|---|---|---|---|
| CO-3423 | 1.2 | 1.4 | 1.7 |
| CO-4124 | 1.2 | 1.7 | 1.7 |
| CO-4361 | 1.1 | 1.3 | 1.6 |
| CO-4362 | 1.1 | 1.1 | 1.4 |
| CO-4363 | 1.3 | 2.2 | 1.8 |
| CO-4364 | 1.1 | 1.3 | 1.6 |

[0231] To determine whether variations in the PO/PS internucleotide bond linkages impacted the ability of CO-3423 and CO-3431 to modulate gene expression, several modified ASOs based on these parent ASOs were prepared. SK-N-AS cells were transfected with increasing concentrations of the mixed PO/PS bond ASOs described in Tables 5 and 6, and GRN mRNA quantified by qPCR. ASOs including mixed PO/PS internucleotide bond linkages did not affect the efficacy of CO-3423 or CO-3431.

[0232] GRN mRNA fold-change after treatment with mixed PO/PS bond versions of CO-3423 is shown in Table 5. mRNA was normalized to the average fold change of cells treated with steric nontargeting controls (CO-3772, CO-1589 (sNTC1), and CO-1929 (sNTC3)).

TABLE 5

| ASO name | 30 nM FC | 60 nM FC | 120 nM FC |
|---|---|---|---|
| CO-4113 | 1.6 | 2.0 | 2.3 |
| CO-3423 | 1.2 | 1.4 | 1.7 |
| CO-4452 | 1.2 | 1.6 | 1.8 |
| CO-4453 | 1.4 | 1.9 | 1.9 |

[0233] As shown in Table 5, the PO/PS mixed versions of CO-3423 had similar efficacy as the parent ASO, CO-3423.

[0234] GRN mRNA fold-change after treatment with mixed PO/PS bond versions of CO-3431 is shown in Table 6. mRNA was normalized as described above.

TABLE 6

| ASO name | 30 nM FC | 60 nM FC | 120 nM FC |
|---|---|---|---|
| CO-3431 | 0.8 | 0.6 | 0.5 |
| CO-4455 | 0.5 | 0.4 | 0.4 |
| CO-4456 | 0.7 | 0.5 | 0.4 |
| CO-4457 | 0.2 | 0.1 | 0.1 |

[0235] Similarly, the PO/PS mixed versions of CO-3431 had similar efficacy as CO-3431.

[0236] To further assess the effect of additional modifications on the ability of CO-3423 parent ASO to modulate GRN gene expression, additional LNA tiling and PO bond modifications were incorporated to CO-3423. SK-N-AS cells were transfected with increasing concentrations of the modified ASOs and GRN mRNA quantified by qPCR. CO-3423 was used for comparison. GRN mRNA was normalized to the average fold-change of cells treated with a steric non-targeting control ASO, CO-1589 (sNTC1). The GRN mRNA fold change induced by each ASO is shown in Table 7.

TABLE 7

| ASO name | 7.5 nM FC | 13 nM FC | 30 nM FC | 60 nM FC | 120 nM FC | 150 nM FC |
|---|---|---|---|---|---|---|
| CO-3423 | 0.9 | 1.1 | 1.3 | 1.5 | 1.4 | 1.8 |
| CO-4113 | 0.9 | 1.1 | 1.5 | 1.9 | 1.9 | 2.0 |
| CO-4359 | 1.2 | 1.6 | 2.0 | 2.4 | 2.4 | 2.6 |
| CO-4364 | 1.1 | 1.2 | 1.7 | 2.1 | 1.9 | 2.3 |
| CO-4452 | 1.0 | 1.1 | 1.7 | 1.9 | 2.1 | 2.5 |
| CO-5266 | 1.0 | 1.0 | 1.2 | 1.7 | 2.0 | 2.2 |
| CO-5267 | 1.0 | 1.0 | 1.2 | 1.7 | 1.9 | 2.3 |
| CO-5268 | 1.0 | 1.1 | 1.5 | 1.9 | 1.9 | 2.6 |
| CO-5269 | 1.0 | 1.2 | 1.6 | 2.2 | 2.1 | 2.2 |

[0237] ASOs with the additional modifications had similar efficacy as ASOs with LNA residues. CO-4452, CO-5268, and CO-5269 had similar or higher efficacy as compared to CO-4113.

[0238] To further assess the effect of modifications on the ability of CO-3463 parent ASO to modulate GRN gene expression, ASOs based on this ASOS incorporating additional LNA modifications were prepared and compared to CO-3462. SK-N-AS cells were transfected with increasing concentrations of the ASOs and GRN mRNA quantified by qPCR. GRN mRNA was normalized to the average fold-change of cells treated with a steric non-targeting control ASO, CO-1589 (sNTC1). The GRN mRNA fold change induced by each ASO is shown in Table 8.

TABLE 8

| ASO name | 7.5 nM FC | 13 nM FC | 30 nM FC | 60 nM FC | 120 nM FC | 150 nM FC |
|---|---|---|---|---|---|---|
| CO-3462 | 1.2 | 1.2 | 1.3 | 1.7 | 2.0 | 1.9 |
| CO-3463 | 1.3 | 1.5 | 1.4 | 1.6 | 1.4 | 1.4 |
| CO-5288 | 1.3 | 1.5 | 1.5 | 1.9 | 1.9 | 2.1 |
| CO-5289 | 1.4 | 1.4 | 1.5 | 1.9 | 1.9 | 1.9 |

[0239] ASOs CO-3462, CO-5288, and CO-5289 upregulated GRN mRNA 2-fold as compared to control ASO CO-1589.

[0240] PGRN protein levels after ASO treatment were also assessed. To assess the effect of ASO treatment on PGRN protein expression, the following experiment was performed. 120 nM of various ASOs (CO-3423, CO-3431, CO-4113) were transfected into SK-N-AS cells. As control, cells treated with a steric non-targeting control ASO, CO-1589 (sNTC1). 48 hours-post transfection, protein was extracted using RIPA Lysis and Extraction Buffer (Thermo Fisher Scientific), and PGRN protein levels determined using a GRN ELISA (PGRN ELISA kit, AdipoGen® Life Sciences; Cat. No. AG-45A-0018). Values were normalized to lysates from cells treated with sNTC1. As shown in FIG. 6, CO-3423 and CO-4113 increased PGRN protein by 1.5- to 3-fold.

[0241] ASOs CO-3462, CO-3463, CO-41113, CO-4359, and CO-5269 also upregulate GRN mRNA in iMGL cells. To test the efficacy of GRN paRNA-targeting ASOs' ability to modulate GRN gene expression in iMGL cells, the following experiment was performed. Briefly, iMGL cells were nucleofected with ASOs CO-3462, CO-3463, CO-4113, CO-4359, CO-5269, as well as, two steric non-targeting control ASOs (CO-3772 and CO-1589 (sNTC1), and a negative control ASO, CO-5075 (described in Laudisi et al. (2019) Mol. Oncol. 13(10): 2142-59. iMGL cells were collected 72 hours post-nucleofection for mRNA quantification using qPCR. Cell supernatant was also collected to quantify secreted PGRN protein using the GRN ELISA described above. mRNA was normalized to cells treated with CO-1589. As shown in FIG. 7A, all tested ASOs (i.e., CO-3462, CO-3463, CO-4113, CO-4359, and CO-5269 upregulated GRN mRNA in iMGL cells as compared to control CO-1589. ASOs CO-4113, CO-4359, and CO-5269 also increased secreted PGRN protein in iMGL cells (FIG. 7B).

[0242] ASOs CO-3431, CO-3463, and CO-4113, CO-4359 and CO-5269 also upregulate GRN mRNA in iPSC wild type or GRN^{M1L} neurons. To test the efficacy of GRN paRNA-targeting ASOs' ability to modulate GRN gene expression in wild-type iPSC-derived neurons and iPSC-derived neurons including the GRN M1L missense mutation (GRN^{M1L}) neurons, the following experiment was performed. Briefly, iPSC-derived neuron cells and GRN^{M1L} neurons were nucleofected with the indicated ASO or a steric non-targeting control (sNTC1; CO-1589) as the negative control. Cells were collected 120 hours post-nucleofection for mRNA quantification using qPCR, and mRNA was normalized to cells treated with sNTC1. As shown in FIGS. 8A and 8B, the tested ASOs upregulated GRN mRNA in wild type-iPSC neurons and in GRN^{M1L} neurons.

[0243] CO-4113 rescued staurosporine-induced toxicity in GRN-FTD patient-derived neurons. GRN-FTD patient-derived neurons were treated with 10 uM of CO-4113 or sNTC (CO-1589) ASOs. As positive controls, cells were treated with either recombinant human PGRN protein (2.5 nM) or brain derived neurotrophic factor (BDNF) protein (1 nM). One week after treatment, neurons were treated with DMSO, 10 nM or 100 nM staurosporine. Culture media was collected 24 hour later, and cell toxicity was measured using LDH-Glo™ Cytotoxicity Assay (Promega Corp.) as instructed by manufacturer. Triton™ X-100-treated cells were used as positive control. All values were normalized to positive control cells to calculate percent cytotoxicity. The assay timeline is provided in FIG. 9A. As shown in FIG. 9B, treatment with ASO CO-4113 reduced the cytotoxicity of GRN-FTD patient-derived neuron cells induced by staurosporine at 10 nm or 100 nM.

[0244] 68 additional ASOs were designed to target intergenic enhancers (eRNA). SK-N-AS cells were transfected with 120 nM of the ASOs indicated in Table 9. 48 hours post-transfection, the cells were collected for GRN mRNA analysis using qPCR. CO-1589, a steric nontargeting control ASO, was used as a control. GRN mRNA was normalized to cells treated with CO-1589. The GRN mRNA fold change induced by each ASO is shown in Table 9 below.

TABLE 9

| ASO name | hGRN mRNA FC | ASO name | hGRN mRNA FC |
|---|---|---|---|
| CO-3423 | 1.6 | CO-4585 | 1.4 |
| CO-3431 | 1.2 | CO-4586 | 0.9 |
| CO-4113 | 1.1 | CO-4587 | 1.2 |
| CO-4124 | 1.3 | CO-4588 | 0.9 |
| CO-4619 | 1.3 | CO-4589 | 1.1 |
| CO-4620 | 1.0 | CO-4590 | 1.3 |
| CO-4621 | 1.2 | CO-4591 | 1.1 |
| CO-4622 | 1.0 | CO-4592 | 1.1 |
| CO-4623 | 1.1 | CO-4593 | 0.8 |
| CO-4624 | 1.3 | CO-4594 | 1.3 |
| CO-4625 | 1.1 | CO-4595 | 1.0 |
| CO-4626 | 1.0 | CO-4596 | 1.0 |
| CO-4627 | 1.3 | CO-4597 | 0.9 |
| CO-4628 | 1.0 | CO-4598 | 1.1 |
| CO-4629 | 1.1 | CO-4599 | 1.0 |
| CO-4630 | 1.0 | CO-4600 | 1.0 |
| CO-4631 | 1.1 | CO-4601 | 1.0 |
| CO-4632 | 1.1 | CO-4602 | 1.2 |
| CO-4633 | 1.3 | CO-4603 | 1.3 |
| CO-4634 | 1.1 | CO-4604 | 1.2 |
| CO-4635 | 1.0 | CO-4605 | 1.2 |
| CO-4636 | 0.9 | CO-4606 | 1.4 |
| CO-4637 | 0.9 | CO-4607 | 1.1 |
| CO-4638 | 1.0 | CO-4608 | 1.1 |
| CO-4639 | 1.1 | CO-4609 | 1.2 |
| CO-4640 | 1.0 | CO-4610 | 1.2 |
| CO-4641 | 0.9 | CO-4611 | 1.4 |
| CO-4642 | 1.0 | CO-4612 | 1.0 |
| CO-4643 | 0.9 | CO-4613 | 1.6 |
| CO-4644 | 1.1 | CO-4614 | 1.2 |
| CO-4645 | 1.4 | CO-4615 | 1.0 |
| CO-4646 | 1.3 | CO-4616 | 1.2 |
| CO-4647 | 0.8 | CO-4617 | 1.2 |
| CO-4648 | 1.6 | CO-4618 | 1.3 |
| CO-4649 | 1.2 | | |
| CO-4650 | 1.1 | | |
| CO-4651 | 1.3 | | |

[0245] The best hits from these ASOs were tested in a dose escalation study. Briefly, SK-N-AS cells were transfected with increasing concentrations of the ASOs indicated in Table 10 at 3.75 nM to 120 nM. Cells were incubated for 48 hours. Subsequently, the cells were collected for mRNA quantification via RT-qPCR. GRN paRNA-targeting ASOs CO-3431, CO-4113, and CO-4124 were used as positive controls. GRN mRNA was normalized to cells treated with CO-1589. The GRN mRNA fold change induced by each ASO is shown in Table 10 below.

TABLE 10

| ASO name | 3.75 nM FC | 7.5 nM FC | 15 nM FC | 30 nM FC | 60 nM FC | 120 nM FC |
|---|---|---|---|---|---|---|
| CO-3431 | 0.9 | 0.9 | 0.6 | 0.5 | 0.4 | 0.4 |
| CO-4113 | 0.9 | 1.1 | 1.5 | 1.9 | 1.9 | 2.0 |
| CO-4124 | 1.0 | 1.0 | 1.0 | 1.2 | 1.4 | 1.9 |
| CO-4606 | 1.1 | 1.1 | 1.2 | 1.3 | 1.4 | 1.7 |
| CO-4611 | 1.1 | 1.1 | 1.1 | 1.1 | 1.1 | 1.3 |
| CO-4613 | 1.0 | 1.1 | 1.2 | 1.1 | 1.2 | 1.4 |
| CO-4619 | 1.0 | 1.1 | 1.3 | 1.2 | 1.2 | 1.6 |
| CO-4622 | 1.0 | 1.0 | 1.0 | 1.0 | 1.1 | 1.1 |
| CO-4631 | 1.1 | 1.1 | 1.2 | 1.1 | 1.1 | 1.3 |
| CO-4637 | 1.1 | 1.1 | 1.2 | 1.1 | 1.2 | 1.3 |
| CO-4649 | 1.2 | 1.2 | 1.3 | 1.2 | 1.2 | 1.3 |

[0246] ASOs CO-4611, CO-4613, CO-4619, CO-4622, and CO-4631, CO-4637, CO-4649 were identified as initial hits. ASOs CO-4606 and CO-4619 showed greater than 1.3-fold GRN mRNA upregulation.

[0247] 26 additional ASOs were designed to target an intragenic enhancer RNA (eRNA). SK-N-AS cells were treated with 120 nM of the ASOs indicated in Table 11 for 48 hours. The cells were collected for GRN mRNA analysis using qPCR. CO-1589 was used as a control. GRN mRNA was normalized to cells treated with CO-1589. The GRN mRNA fold change induced by each ASO is shown in Table 11 below.

TABLE 11

| ASO name | hGRN mRNA FC |
|---|---|
| CO-6430 | 1.0 |
| CO-6431 | 0.8 |
| CO-6432 | 1.0 |
| CO-6433 | 0.9 |
| CO-6434 | 0.9 |
| CO-6435 | 1.2 |
| CO-6436 | 1.1 |
| CO-6437 | 1.1 |
| CO-6438 | 1.2 |
| CO-6439 | 1.1 |
| CO-6440 | 1.0 |
| CO-6441 | 1.4 |
| CO-6442 | 1.2 |
| CO-6443 | 1.0 |
| CO-6444 | 1.0 |
| CO-6445 | 1.3 |
| CO-6446 | 1.1 |
| CO-6447 | 1.2 |
| CO-6448 | 1.1 |
| CO-6449 | 1.1 |
| CO-6450 | 0.9 |
| CO-6451 | 1.0 |
| CO-6452 | 1.4 |
| CO-6453 | 0.9 |
| CO-6454 | 1.0 |
| CO-6455 | 0.9 |

[0248] ASOs CO-6411, CO-6445 and CO-6452 showed greater than 1.3-fold GRN mRNA upregulation.

[0249] Additional ASOs based on parent ASO CO-3462 were designed. SK-N-AS cells were transfected with increasing concentrations of ASOs based on CO-3462, designed to include chemical modifications and additional antisense nucleotide sequences. GRN mRNA quantified using qPCR. CO-3462 and CO-4113 were used as controls. GRN mRNA was normalized to cells treated with CO-1589. The GRN mRNA fold change induced by each ASO is shown in Table 12.

TABLE 12

| ASO | | | | ASO | | | |
|---|---|---|---|---|---|---|---|
| name | 30 nM FC | 60 nM FC | 120 nM FC | name | 30 nM FC | 60 nM FC | 120 nM FC |
| CO-3462 | 0.9 | 1.2 | 1.7 | CO-6387 | 1.3 | 1.0 | 1.1 |
| CO-4113 | 1.4 | 1.4 | 2.1 | CO-6388 | 1.1 | 1.0 | 1.4 |
| CO-6380 | 0.8 | 0.8 | 0.8 | CO-6389 | 1.0 | 1.0 | 2.1 |
| CO-6381 | 0.8 | 0.7 | 1.0 | CO-6390 | 1.3 | 1.3 | 1.5 |
| CO-6382 | 0.8 | 0.8 | 0.9 | CO-6391 | 1.3 | 1.0 | 1.6 |
| CO-6383 | 1.2 | 1.0 | 1.2 | CO-6392 | 1.0 | 0.8 | 1.0 |
| CO-6384 | 1.0 | 1.0 | 1.5 | CO-6393 | 0.9 | 0.7 | 1.0 |
| CO-6385 | 1.1 | 1.2 | 1.3 | CO-6394 | 1.1 | 0.9 | 1.3 |
| CO-6386 | 1.2 | 0.9 | 1.1 | CO-6395 | 1.0 | 1.3 | 1.6 |
| CO-6396 | 1.4 | 1.9 | 1.9 | CO-6410 | 1.1 | 1.0 | 1.6 |
| CO-6397 | 1.4 | 1.8 | 1.8 | CO-6411 | 1.1 | 1.4 | 1.8 |
| CO-6398 | 1.3 | 1.5 | 1.8 | CO-6512 | 1.3 | 1.8 | 1.3 |
| CO-6399 | 1.3 | 1.6 | 1.9 | CO-6513 | 1.3 | 2.7 | 1.8 |
| CO-6400 | 1.1 | 1.3 | 1.3 | CO-6514 | 1.4 | 1.9 | 1.8 |
| CO-6401 | 1.2 | 1.5 | 1.7 | CO-6515 | 1.2 | 1.8 | 1.7 |
| CO-6402 | 1.5 | 1.6 | 1.8 | CO-6516 | 1.0 | 1.4 | 1.0 |
| CO-6403 | 1.6 | 2.2 | 2.4 | CO-6517 | 1.2 | 2.3 | 2.0 |
| CO-6404 | 1.3 | 1.3 | 1.5 | CO-6518 | 1.2 | 1.3 | 0.9 |
| CO-6405 | 1.1 | 1.3 | 1.3 | CO-6519 | 1.1 | 1.0 | 0.9 |
| CO-6406 | 1.4 | 1.4 | 1.7 | CO-6520 | 1.0 | 1.2 | 0.8 |
| CO-6407 | 1.1 | 1.2 | 1.6 | CO-6521 | 1.1 | 1.2 | 1.1 |
| CO-6408 | 1.0 | 1.1 | 1.5 | CO-6522 | 1.1 | 1.0 | 1.1 |
| CO-6409 | 1.1 | 1.1 | 1.5 | CO-6523 | 2.9 | 1.4 | 1.3 |

[0250] Additional ASOs based on parent ASOs CO-4363 and CO-4364 were designed. SK-N-AS cells were transfected with increasing concentrations of ASOs based on CO-4363 and CO-4364 designed to include additional chemical modifications, and GRN mRNA quantified using qPCR. GRN mRNA was normalized to cells treated with CO-1589. The GRN mRNA fold change (FC) induced by each ASO is shown in Table 13.

TABLE 13

| ASO | | | |
|---|---|---|---|
| name | 30 nM FC | 60 nM FC | 120 nM FC |
| CO-3423 | 1.1 | 1.6 | 1.4 |
| CO-4113 | 1.6 | 1.9 | 1.6 |
| CO-4363 | 1.6 | 1.7 | 1.7 |
| CO-4364 | 1.1 | 1.5 | 1.6 |
| CO-6412 | 1.0 | 0.8 | 0.9 |
| CO-6413 | 1.0 | 0.6 | 0.7 |
| CO-6414 | 1.6 | 1.4 | 1.3 |
| CO-6415 | 1.3 | 1.6 | 1.6 |
| CO-6416 | 1.4 | 1.6 | 2.2 |
| CO-6417 | 1.4 | 2.3 | 2.8 |
| CO-6418 | 1.6 | 1.6 | 1.9 |
| CO-6419 | 1.0 | 1.0 | 0.9 |
| CO-6420 | 1.4 | 2.7 | 2.2 |
| CO-6421 | 1.3 | 2.1 | 1.7 |
| CO-6422 | 1.9 | 2.0 | 2.1 |
| CO-6423 | 1.2 | 2.6 | 2.8 |
| CO-6424 | 1.7 | 2.9 | 3.1 |
| CO-6425 | 0.9 | 1.3 | 1.3 |
| CO-6426 | 0.8 | 1.5 | 1.3 |
| CO-6427 | 1.2 | 1.1 | 1.2 |
| CO-6428 | 1.1 | 1.4 | 1.0 |
| CO-6429 | 1.0 | 1.5 | 1.4 |

[0251] ASOs CO-6416, CO-6417, CO-6420, CO-6423 and CO-6224 showed greater than 2-fold GRN mRNA upregulation.

[0252] Select ASOs were assessed for IFNγ-induced immune suppression activity. To assess the ability of GRN regRNA-targeting ASOs to mitigate immunosuppression induced by IFNγ, the following experiment was performed. Briefly, iMGL cells were nucleofected with CO-4113, CO-4359, or CO-5269. A steric non-targeting control ASO was used as control. After ASO nucleofection, IFNγ was added to the culture media of the ASO-treated iMGL cells to induce an immune response. As additional control, cells treated with the steric non-targeting control ASO were solely treated with phosphate-buffered saline (PBS). Cells and supernatants were collected for qPCR and ELISA quantification of secreted protein (PGRN, IL-8, and CCL4) and gene expression (IL-6 mRNA, CCL4 mRNA, and CCL2 mRNA).

[0253] As shown in FIG. 19, treatment of the iMGL cells with the GRN regRNA-targeting ASOs upregulated secreted PGRN protein levels and significantly reduced the IFNγ-mediated expression of immune response genes IL-8 and CCL4, as shown by the reduced secretion of IL-8 and CCL4 protein. Treatment of the iMGL cells with the GRN regRNA-targeting ASOs also significantly reduced the IFNγ-mediated expression of immune response genes IL-6, CCL4, and CCL2, as shown by their respective reduced mRNA levels (FIG. 19).

### Example 2: Synthesis and In Vitro Characterization of Mouse GRN regRNA-Targeting ASOs

[0254] mGRN expression in various mouse tissues was determined. To determine whether GRN paRNA and mRNA is expressed in mouse CNS tissue, CNS tissue from a C57/BL6 mouse was lysed and RNA extracted using TRIzol™ reagent (Thermo Fisher Scientific) and analyzed using qPCR. cDNA was synthesized with and without reverse transcriptase (RT) to ensure that the amplified products were derived from RNA in the samples. As shown in FIG. 10, GRN mRNA and paRNA were detected and are expressed in the murine cortex, hippocampus, striatum, cerebellum, and spinal cord.

[0255] To assess the levels of Pgrn protein in mouse samples, the following experiment was performed. Briefly, mouse plasma, CSF, and brain tissue derived from C57/BL6 mice were obtained. Brain tissue (cortex or mixed brain regions) was homogenized in RIPA buffer containing protease inhibitors. Mouse Pgrn protein levels were quantified by ELISA (Mouse Pgrn ELISA Kit, AdipoGen® Life Sciences; Cat. No. AG-45A-0019) as instructed by manufacturer. Serum and brain samples were assessed at varying dilutions, and all sample results normalized to total protein. As shown in FIGS. 11A, 11B, and 11C, the assay detected mouse Pgrn in serum, CSF, and cortex and mixed brain regions lysate.

[0256] Mouse Grn paRNA is also expressed in mouse neuroblastoma Neuro2a cells. To assess whether mouse Grn paRNA is expressed in the immortalized neuroblastoma cell line Neuro2a, cells were exposed for 24 hour to vorinostat (VOR) at either 0.3 uM, 1 uM or 3 uM or DMSO control, and total RNA was extracted from Neuro2a cells using a Qiagen RNeasy Kit, and cDNA was synthesized using random hexamers. Mouse Grn paRNA was detected using two different primer sets (1F/1R or 3F/3R) by a real-time quantitive PCR (qPCR) assay. As shown in FIG. 12, mouse Grn paRNA levels increase with vorinostat treatment.

[0257] 91 steric ASOs were designed and synthesized targeting the mGrn regRNAs. 33 ASOs were selected for tiling after a first pass screening. 88 ASOs were designed and synthesized for fine tuning. Of these, 5 ASOs were gapmers, 11 were sterics, 28 had PO/PS bonds, and 44 were mixmers.

[0258] 57 ASOs targeting the Grn promoter (− strand) were screened in Neuro2a cells. Neuro2a cells were transfected with 100 nM of each of the ASOs listed in Table 14 and cells were harvested 48 hours later for Grn mRNA quantification using qPCR. Housekeeping genes for normalization were Gapdh and Ppia. Relative Grn mRNA levels were normalized to mRNA extracted from cells treated with sNTC3 (steric nontargeting control). As shown in FIG. 13, Grn regRNA-targeting ASOs CO-3544 and CO-3595 upregulated mGrn mRNA in a dose-dependent manner and upregulated mGrn mRNA up to 1.5-fold and 1.8-fold, respectively.

[0259] The mGm mRNA fold change (FC) induced by each ASO at 100 nM is shown in Table 14.

TABLE 14

| ASO | mGRN mRNA |
|---|---|
| name | FC |
| CO-3544 | 1.1 |
| CO-3545 | 1.7 |
| CO-3546 | 1.4 |
| CO-3547 | 1.7 |
| CO-3548 | 1.5 |
| CO-3549 | 1.4 |
| CO-3550 | 0.9 |
| CO-3551 | 1.5 |
| CO-3552 | 1.1 |
| CO-3553 | 1.3 |
| CO-3554 | 1.2 |
| CO-3555 | 1.5 |
| CO-3556 | 1.3 |
| CO-3557 | 1.6 |
| CO-3558 | 1.2 |
| CO-3559 | 1.4 |
| CO-3560 | 1.2 |
| CO-3561 | 1.3 |
| CO-3562 | 1.1 |
| CO-3563 | 1.5 |
| CO-3564 | 1.1 |
| CO-3565 | 1.6 |
| CO-3566 | 1.1 |
| CO-3567 | 1.1 |
| CO-3568 | 1.2 |
| CO-3569 | 1.2 |
| CO-3570 | 1.2 |
| CO-3571 | 1.4 |
| CO-3572 | 1.3 |
| CO-3573 | 1.4 |
| CO-3574 | 1.3 |
| CO-3575 | 1.2 |
| CO-3576 | 1.2 |
| CO-3577 | 1.1 |
| CO-3578 | 1.0 |
| CO-3579 | 1.2 |
| CO-3580 | 1.2 |
| CO-3581 | 1.1 |
| CO-3582 | 1.1 |
| CO-3583 | 1.2 |
| CO-3584 | 1.1 |
| CO-3585 | 1.7 |
| CO-3586 | 1.4 |
| CO-3587 | 1.9 |
| CO-3588 | 0.9 |
| CO-3589 | 1.3 |
| CO-3590 | 1.2 |
| CO-3591 | 1.4 |
| CO-3592 | 1.2 |
| CO-3593 | 1.1 |
| CO-3594 | 1.6 |
| CO-3595 | 2.3 |
| CO-3596 | 1.4 |
| CO-3597 | 1.2 |
| CO-3598 | 1.3 |
| CO-3599 | 1.0 |
| CO-3600 | 1.5 |

[0260] Next, 26 ASOs based on parent ASOs CO-3544 and CO-3595 were designed with different modifications and base walking. Neuro2a cells were transfected with either 80, 120 or 160 nM of each of the ASOs listed in Table 15, and cells were harvested 48 hours later for mGrn mRNA quantification using qPCR. As controls, cells were treated with sNTC3 or no ASO. Housekeeping genes for normalization were Gapdh and Ppia. Relative Grn mRNA levels were normalized to mRNA extracted from cells treated with sNTC3. Four new ASOs (CO-4082, CO-4083, CO-4084, CO-4085) upregulated mGRN mRNA in Neuro2a cells by 1.5- to 2.5-fold (FIG. 14). Similar upregulation was observed with these ASOs when used to treat primary mouse neuron cells (1.5-6 μM by free uptake, FIG. 15).

[0261] CO-3544 was modified to include PO/PS bonds and the efficacy in upregulating mGrn mRNA was determined. As shown in Table 15 below, CO-3544 with up to 9 PO to PS internucleotide bond substitutions was effective in upregulating mGrn mRNA after transfection in Neuro2a cells at 40, 80 and 160 nM following transfection.

TABLE 15

| ASO name | 40 nM FC | 80 nM FC | 160 nM FC |
|---|---|---|---|
| CO-3544 | 1.2 | 1.3 | 1.4 |
| CO-4082 | 1.4 | 1.6 | 1.4 |
| CO-5290 | 1.1 | 1.0 | 1.0 |
| CO-5291 | 0.9 | 1.0 | 0.9 |
| CO-5292 | 1.1 | 1.1 | 1.1 |
| CO-5293 | 1.1 | 1.0 | 1.1 |
| CO-5294 | 1.1 | 1.1 | 1.3 |
| CO-5295 | 1.1 | 1.3 | 1.4 |
| CO-5296 | 1.1 | 1.1 | 1.0 |
| CO-5297 | 1.0 | 1.1 | 1.2 |
| CO-5298 | 1.3 | 1.3 | 1.5 |
| CO-5299 | 1.2 | 1.3 | 1.5 |
| CO-5300 | 1.3 | 1.4 | 1.4 |
| CO-5301 | 0.9 | 1.0 | 0.7 |
| CO-5302 | 1.3 | 1.2 | 1.0 |

[0262] Similarly, CO-3595 was modified to include varying PO/PS internucleotide bonds and the efficacy of these ASOs in upregulating mGrn mRNA was determined in Neuro2A cells. As shown in Table 16 below, ASOs based on CO-3595 including up to 13 PO/PS internucleotide bond substitutions were effective in upregulating mGrn mRNA at 40, 80 and 160 nM following transfection.

TABLE 16

| ASO name | 40 nM FC | 80 nM FC | 160 nM FC |
|---|---|---|---|
| CO-3595 | 1.2 | 1.3 | 1.4 |
| CO-4083 | 1.3 | 1.4 | 1.6 |
| CO-5303 | 1.3 | 1.6 | 1.8 |
| CO-5304 | 1.4 | 1.6 | 2.2 |
| CO-5305 | 1.2 | 1.4 | 1.6 |
| CO-5306 | 1.2 | 1.0 | 1.3 |
| CO-5307 | 1.0 | 1.1 | 1.1 |
| CO-5308 | 1.3 | 1.4 | 2.0 |
| CO-5309 | 1.3 | 1.7 | 2.0 |
| CO-5310 | 1.1 | 1.1 | 1.3 |
| CO-5311 | 1.5 | 1.7 | 1.7 |
| CO-5312 | 1.5 | 1.7 | 1.8 |
| CO-5313 | 1.3 | 1.4 | 1.5 |
| CO-5314 | 1.5 | 1.7 | 1.5 |
| CO-5315 | 1.3 | 1.4 | 1.6 |

### Example 3: In Vivo Modulation of Mouse GRN Expression with regRNA-Targeting ASOs

[0263] ASO-mediated upregulation of progranulin in different brain regions in vivo was determined. ASO CO-3544 (300 μg) in PBS was injected into right lateral ventricle of 8-week-old C57/BL6 mice. A steric nontargeting control ASO (CO-1929), and vehicle (PBS) control were used as controls. Mice were sacrificed at day 28 post-injection. Tissue samples (cortex, hippocampus and striatum) were collected and processed for total RNA and protein extraction as described above. Mouse Grn mRNA quantification was performed using real time qPCR assay.

[0264] As shown in FIG. 16, treatment with CO-3544 increased Grn mRNA levels by greater than 1.5-fold across different brain regions. Thus, this ASO showed in vivo therapeutic efficacy as noted by its ability to upregulate Grn mRNA levels in mouse CNS tissue.

### Example 4: In Vivo Modulation of PGRN in hGRNT^{Tg} Mice

[0265] To assess the ability of hGRN paRNA-targeting ASOs to upregulate hGRN in vivo, experiments using a human GRN transgenic mouse model were performed as described below.

### Materials

[0266] CO-4359 was modified to remove the 3′ and 5′ terminal nucleotides resulting in CO-8178. CO-8178 was characterized in SK-N-AS, HEK293T and Vero-76 cell lines, as well as NGN2 neurons and iMGL cells, as previously described (data not shown).

[0267] B6.Cg-Grn^{tm1.2Blrl}Hprt1^{tml(GRN)Blrl}/J mice (hGRN^{Tg}; The Jackson Laboratory, Strain No. 036240) were used to assess the efficacy of the ASO CO-8178 in upregulating human GRN in vivo. These mice express an X-linked transgenic human GRN gene (Hprttm1(GRN)Blrl) and have knockouts of exons 3 and 4 in the mouse Grn gene (Grntm1.2Blrl).

[0268] Mice were injected intracerebroventricular (ICV) with 5 μL of aCSF (vehicle control) or 100 μg CO-8178 at a rate of 1 μl/min. Animals were sacrificed 3 weeks post-dosing for analysis. Mouse brain sections were processed to analyze PGRN protein and mRNA levels. GRN mRNA and intracellular and secreted PGRN were quantified using the methods described above.

[0269] The in vivo assay with the hGRN^{Tg} mice was repeated with ASOs CO-4452, CO-8883, CO-8903, CO-8879, CO-8871, CO-8873, CO-8873, CO-3462, and CO-6424 as described above. aCSF and a steric nontargeting (NTC) were used as controls. Mouse brain sections were processed for measuring PGRN protein and mRNA. GRN mRNA and intracellular and secreted PGRN protein were quantified using the methods described above.

### Results

[0270] CO-8178 upregulated GRN mRNA in SK-N-AS, HEK293T and Vero-76 cell lines as well as NGN2 neurons and iMGL cells (data not shown). CO-8178 also suppressed the IFNγ-induced immune response in iMGL cells (data not shown). Without wishing to be bound by theory, CO-8178 is an 18mer so it may be better distributed across tissues and more likely to escape from the endosome.

[0271] As shown in FIGS. 20A and 20B, in vivo treatment with CO-8178 upregulated GRN mRNA and protein across all CNS tissues assessed. FIG. 20A provides hGRN mRNA quantifications and FIG. 20B provides hPGRN protein quantification in hGRNT^{Tg} mice. Samples from aCSF-treated control mice are shown in the bars on the left of each tissue, samples from CO-8178 treat mice are shown in the bars on the right of each tissue. The GRN mRNA and protein expression levels correlated post-treatment with CO-8178. r=0.8158, 95% CI was 0.7079-0.8899, r²=0.6699. P value <0.0001. In addition, secreted PGRN protein in the CSF was also upregulated post-CO-8178 treatment (FIG. 20C). Thus, CO-8178 upregulated GRN mRNA and PGRN protein in human GRN mice across all measured CNS tissue. CO-8178 upregulated the secreted PGRN protein in the CSF. In addition, upregulation of GRN mRNA and PGRN protein were significantly correlated.

[0272] As shown in FIGS. 21A and 21B, in vivo treatment with CO-4452, CO-8883, CO-8903, CO-8879, CO-8873 upregulated human GRN mRNA and PGRN protein across all tissues examined. FIG. 21A provides hGRN mRNA quantifications and FIG. 21B provides human PGRN protein quantification in hGRNT^{Tg} mice brain tissues

### Example 5: In Vivo Modulation of Grn mRNA in Grn^{+/-} Haploinsufficient Mice

[0273] To assess a mouse model analog of human GRN haploinsufficiency, the following experiments were performed using a Grn heterozygous knockout mouse.

### Materials and Methods

[0274] Grn^{tm1.1Far} (B6.129S4(FVB)-Grn^{tm1.1Far}/Mmjax; The Jackson Laboratory, Cat. No. MMRRC Strain #036771-JAX) heterozygous mice were used to assess the efficacy of CO-3544 and CO-10691 to upregulate mGrn in vivo. These mice have deletion of exon 2-13 of the mouse Grn gene. CO-3544 and CO-10691 target mouse Grn paRNA.

[0275] Mice were injected ICV with 5 μL of artificial CSF (aCSF; vehicle control), 300 μg of ASO CO-3544, or 200 μg of ASO CO-10691, each in aCSF, at a rate of 1 μL/min. For ASO CO-3544, mice were sacrificed 4 weeks post-dose for analyses. For CO-10691, mice were sacrificed 2 and 4 weeks post-dose for analyses. Mouse brain sections were processed, and Pgrn protein and Grn mRNA quantified, as described above.

### Results

[0276] As shown in FIGS. 22A and 22B, in vivo treatment of heterozygous Grn^{tm1.1Far} mice with ASO CO-3544 resulted in a 1.5- to 2.0-fold increase in Pgrn protein expression in the hippocampus, striatum, and cerebellum brain regions, as compared to aCSF vehicle control (FIG. 22B). Treatment with ASO CO-3544 resulted in up to 1.5-fold increase in Grn mRNA expression as compared to aCSF vehicle control (FIG. 22A).

[0277] ASO CO-10691 also upregulated mGm mRNA (FIGS. 23A, 23B, 23C, and 23D) and murine Pgrn protein (FIG. 24) expression in the cortex, hippocampus, striatum, and cerebellum brain regions, as compared to aCSF vehicle control.

### Example 6: Synthesis and In Vitro Characterization of Additional Human GRN regRNA-Targeting ASOs

[0278] Further hGRN regRNA-targeting ASOs were designed and synthesized with additional chemical modifications, and characterized in vitro.

### Materials and Methods

### Secreted and Intracellular GRN Levels

[0279] SK-N-AS cells were transfected with 90 nM of the ASOs CO-4359, CO-4452, CO-5268, CO-5269, CO-6424, and CO-8178. A steric nontargeting control ASO (sNTC) was used as a control. Cells were collected and analyzed via ELISA 48 hours post-transfection, as described in Example 1 above. Protein levels were normalized to total protein and cells treated with sNTC.

mRNA Expression Assay

[0280] SK-N-AS cells were transfected with 3.75 to 90 nM of selected ASOs. Scrambled ASO (sNTC) was used as a control. Cells were collected for mRNA 48 hours post-transfection. Housekeeping genes were GAPDH and PPIA, mRNA fold change was normalized to cells treated with sNTC.

[0281] iPSC-derived neurons were nucleofected with 20 μM of ASOs CO-8865, CO-8866, CO-8871, CO-8873, CO-8875, CO-8877, CO-8879, CO-8883, CO-8889, CO-8901, and CO-8903. Two non-targeting control ASOs (NTC-ASO-1 and NTC-ASO-2) were used as control. Cells were harvested 5 days post-nucleofection for GRN mRNA quantification. The qPCR reference genes were GAPDH and PPIA. Relative GRN mRNA levels were normalized to cells treated with either of the two non-targeting control ASOs.

### Chemokine Assay

[0282] iMGL cells were nucleofected with 5 uM of CO-4452, CO-8865, CO-8866, and CO-8883. A non-targeting control ASO (NTC) was used as a control. After treatment, IFNγ was added to the ASO-treated iMGL cells to induce an immune response. Cells and supernatants were collected for qPCR and ELISA quantification GRN, CCL3 and CCL4 gene expression.

### Results

[0283] As shown in FIGS. 25A and 25B, ASOs CO-4359, CO-4452, CO-5268, CO-5269, CO-6424 and CO-8178 upregulated both secreted (FIG. 25A) and intracellular (FIG. 25B) PGRN protein in SK-N-AS cells. A dose-dependent increase in GRN mRNA expression in SK-N-AS cells was also observed with CO-4113, CO-8877, CO-8879, CO-8883, CO-8889, CO-8901, and CO-8903 (FIGS. 26A and 26B).

[0284] Upregulation of GRN mRNA in iPSC-derived neuron cells was also observed with CO-8865, CO-8866, CO-8871, CO-8873, CO-8875, CO-8879, CO-8883, CO-8889, CO-8901, and CO-8903 (FIG. 27).

[0285] As shown in FIGS. 28A, 28B, and 28C, ASOs CO-4452, CO-8865, CO-8866, CO-8873, and CO-8883 also upregulate GRN mRNA expression (FIG. 28A) and reduced IFNγ-induced chemokine (CCL3 and CCL4) expression in iMGL cells (FIGS. 28B and 28C, respectively).

### INCORPORATION BY REFERENCE

[0286] Unless stated to the contrary, the entire disclosure of each of the patent documents and scientific articles referred to herein is incorporated by reference for all purposes.

### EQUIVALENTS

[0287] The invention may be embodied in other specific forms without departing from the spirit or essential characteristics thereof. The foregoing embodiments are therefore to be considered in all respects illustrative rather than limiting the invention described herein. Scope of the invention is thus indicated by the appended claims rather than by the foregoing description, and all changes that come within the meaning and range of equivalency of the claims are intended to be embraced therein.

The application's sequence listing, which the Patent Office published only in electronic form, follows.

SEQUENCE LISTING (4949 sequences)

SEQ ID NO: 1 - RNA, 3220 nt, Homo sapiens
  source 1..3220: mol_type = genomic RNA
ctccgttatcttccactaggtggcaccccccaactccgagtgccaaggggagaggaaattcccaaaaggggagccaacctagctgcaaatgagcaggaaaaagtggctgggagaggcggaagctagctcgtcccacccgcaacaagaggaagtaaggaggagccagaccaggttcagtcaccactcccaagtccctactaccttcgagaagccaaggtctcaggtctcgttcccaggccctcggagctcccagcccagggtcgcgcgcccctccggctccaggccgccgcgggaaccacccaccaccaccaggagaggggaagaagccagcacctaccgacaggggtggagctgggtcaagaatggtgtggtccctgctttgggggaatgctggggaggtagaaagccccttctaacggggcgtcactgcaattactgcttcctctttcccataaaactccccctagtgtatcagaacccccaaggagtttcagtaagcggttcttctgttgtctccggctgagactccaggggaacctcaagctcacatggccctggcgggcccctgggcaggagcaggcgagaggtctgcgcggccgctctcctacctgcgtccgactccgcggtccttgggcagcagcaaccgggtagcgctcagactacagaccccagcgcgatgacccgcctacctcagtttccattggccagggatcagggctacccgctcccattggctacttatcaatatagaggtggggccagcctggaatgctgtgtttcttttctactcaaatcactctcctccctgcttcctctcgccccacaccccatttctagggatcatgtgattggagaatcatgtgacgtcgggacagcctcagcagggcagctggtgctcgtcgccttccttaacccatcctgcaggcgcctgggggagtttgctagagatgatagcgcgtgtctggggcattgacagtgcgagggagtgttatgaattgggaatatttgtgctcgcctttctatccttttgtttgtttgttctgagacggagtctcactctgtcgccaggctggagtgcagtggcacgatctcggctcactgcaacctctgcctcccgggttcaagcgattctcctgcctcagcctcccgagtagctgggactacaggcgcgcaccaccacgcccagctaatttttgtatttttagtagagacggggtttcaccatgttggccaggatggtctcgatttcttgacctcgtgatccgcccacctcggcctcccaaagtgctaagattacaggcatgagccaccgcgcccggacttgtgtgtttgttttagagacagggtctcgctcagtcgcccaagctgatcatagctcactgcggcctgcaactcctgctcccaaagcgattctcctaccgcagccccccaaggcgctgggattacaaatgtgagctactgagctggctcgctcctatcctatcctgccctgtcttgtcctgtcctgtcctgccctattctgccctattctccaaactcggttgacatgctaggcaggccccagagtgagttgaaggatggtttccaggacaaagataaacagccccaaagccctttcctcaaggtgctcagcaggacagggagcagggattggtgggagacagtctcaggctgaatctaatttaagatacaaggttgtgcgccagttgccaggtgtagggagaggaagtagattgtctccaggtggggaagaagagatttcattccaccttaggagcatctccttgagctgagtctgggaagattttaactggcaggtggaggaggaggtgttgggaagagccctgggaaaccagatgggaagggcaggcttggcagggattgaatgccatgttcaatgccagtgggcttcaggagctgctgggtgcctggcacgggctgggctgtggtgggggctgtcgaaagagaagtggcttcctagtctccagatcggccctgccttcgaggaattgatatgggagggtgaggagagaaaatgtaccacagaacagattagccagtgacaagagtcagcctgcttggtgccaaagggcctgggccaggcagagatggatgatgggagatgggccaggagagaggagaggcccagggaaagcctgatactgggccgtggaggaacggcagtgtctgcacaggggatggagactgctgcagcctgagcaaggaactggagctgaggatgaggcaggggcagggggatggctaaccaagctcgaggcagcagaagtcggaggagggaaagggtgccaaccgagctgtggagtcgtgtggcaggggttctaagcctggagctagagcagacccagacagcggataagacacctggcctgctgaggacctagtactagtctgtgccctggtgacacatttgtgcttattttccttcctgtgtatcttgagactagggagtatagtttatgcttctattgaaacacacacacacatgaaactttcatgaaatgttaggtgaatcgatcaataacctactaattacaaccacccagaaccagaaaaaaatacaggtagaagaaaaaaaacctaaacagactgaaacaaatatcacaaagtctaatcgtcaaagccgtgattcttgagcagcggcaattttgccggccagggacatttaggagtgtctggagacaatctgggttgtcacaactcagggtggagggacactggcatctggtaggtaagggccagcaatcccactaaacatcacacgacacacagaacaatcccccacaacaaagaagtatcctgcccaaaaggtcaatagtgctgagactcaacaacctacttcacaaatgtttctctctctctctctcgctctttttttttttttttttaacatcagaagggtaaggtgccacgataacgaggtctgtaattccctactcaggaggccgaggcaggagaatcgcttgaacccgggatgcagaggttgcagtaaaccgagatcgtgccactgcattccagcctggacaacagagcgagactccatccacccccgccaacacaaaaaaattaaagtgtacaactcaatggtttttagtgtcttaagagagttatgcagcatcattacaatcagtttaagaccatttttatcaccacagaaggcagccttatgtcctttagcagtcaccctccctaaccctaggca

SEQ ID NO: 2 - RNA, 1007 nt, Homo sapiens
  source 1..1007: mol_type = genomic RNA
cggaaggcggaggttgcggtgagccgagactgcgccattgcactccagcctgggcaacaagagcgaaactccgtctgaaaaagaaatagattaccccgttttacagaaagtgaaactgaggctcgacgtgaagagccggagattcgaaccggccgggtgcttttcccagggctccacactgcctccccgggagacaggaaggcttaagtccagcgctgccctctccgatcccgcttgtcagggagacactttatttcccggggcagccccgtaccccaggccccaccacccacttcgcgtttagaacttctgtgctatcttgcttatttgtcctaacagagaaaccagcacgcgcgggcggtggcggaggggggcgggcgggcgggtggaggcgggggggggcgggcggggagatgggtactcctagcctgcgcctttaagaagggtaggcctcgactttgacgtctctgccttccccgcccttcaggcccccactggtcgcgtccggcgctggaggagcccagtcagccggcgcctgccgggttagcacgtggactccgaggggccaactatcagctttccctgacaaaatgcctttgagctcccccacagctctgaaactccagcttgggagcagggagagtgcaatctgtgacctgtaaaggggcgctgggcaaaagggcccgagagaaggcgtcctttccattcccttcccatctcaagctgagttcagaaatgacacgaaataatttaatcaactatcagtcaaggtcgggctcacgcctgtaatcccagcagtttgggaggccgaggtgggcggatcacctgaggacaggagttcgagaccagcctgaccaacatgacgaagccccgtctctactaaaaatacaaaaattagccagcggtggtggtgcgcacctgtagtctcagctacttgggaggctgaggccagagaatcgcttgagcccgcgaggtcgaggctgcagtgagccgagatcacaccactg

SEQ ID NO: 3 - RNA, 1007 nt, Homo sapiens
  source 1..1007: mol_type = genomic RNA
cagtggtgtgatctcggctcactgcagcctcgacctcgcgggctcaagcgattctctggcctcagcctcccaagtagctgagactacaggtgcgcaccaccaccgctggctaatttttgtatttttagtagagacggggcttcgtcatgttggtcaggctggtctcgaactcctgtcctcaggtgatccgcccacctcggcctcccaaactgctgggattacaggcgtgagcccgaccttgactgatagttgattaaattatttcgtgtcatttctgaactcagcttgagatgggaagggaatggaaaggacgccttctctcgggcccttttgcccagcgcccctttacaggtcacagattgcactctccctgctcccaagctggagtttcagagctgtgggggagctcaaaggcattttgtcagggaaagctgatagttggcccctcggagtccacgtgctaacccggcaggcgccggctgactgggctcctccagcgccggacgcgaccagtgggggcctgaagggcggggaaggcagagacgtcaaagtcgaggcctacccttcttaaaggcgcaggctaggagtacccatctccccgcccgcccccccccgcctccacccgcccgcccgcccccctccgccaccgcccgcgcgtgctggtttctctgttaggacaaataagcaagatagcacagaagttctaaacgcgaagtgggtggtggggcctggggtacggggctgccccgggaaataaagtgtctccctgacaagcgggatcggagagggcagcgctggacttaagccttcctgtctcccggggaggcagtgtggagccctgggaaaagcacccggccggttcgaatctccggctcttcacgtcgagcctcagtttcactttctgtaaaacggggtaatctatttctttttcagacggagtttcgctcttgttgcccaggctggagtgcaatggcgcagtctcggctcaccgcaacctccgccttccg

SEQ ID NO: 4 - RNA, 1253 nt, Homo sapiens
  source 1..1253: mol_type = genomic RNA
atatatatatatatatataaaacagctgggatcagcccaatttggggaagtcctccctgtctccccctgcctctgtggcctgagaaggtgggctggaagtgtctaggcacccaaggctttattggggggccctgggtgtggtctgaggaggtgggcccctagagggagagggtcctggctaagactttccagcatgtcccccagcctgggtcccagagctctgctgggacagcgtggattaatatggaaggtagttttagccatagctatgaaaattctaaacgccaaacccttgatccagccaggccacttctaagcgtttctctagtcatctgctcatacaagtgtgaaatgatggtaccagcttggccttcttcattgcagccttctttgtaacagcagaacatcccgtgaaagggaactgttaagtacgtgaccctatctccatgtgacaaatccacacagccttgaaagggcggcattccctgacctatccaggtggggtggggggtgagggctgcagatctctatatcattatgtaaaacaatctcaaagacagagttaaattaaacagcaggtgctgagagcgtgctggacactcgttccaaacagcagcgttactgccccctagaggacattttttgaaatttatgcggccactgtcatttctggttgtcacaagactggggcttctggcatttgatagatggcaggtcagggaagctaaatgccctgtaaggtgtaggacagtctgacacaatagggaatttccaacaacaagaacacatctctcaatttccttctgtctttctgggcaattacatacatgaggaaatgtttgcaattctcagacctggaaaatggttctgttttacccatatacccacacctttttttttttttttagacagggtctctcactctgtcgctggttggagtgcagtagcacgatcacagctcactacagcctcgacctccccggctcaagcgatcctcccacctcagcctcccgagtagcacactcctctgcctgactaattcgtttgtatttgttgtagagacagggtttcgctatgctgcccaggttgtaaccatacttcttttgaatacttatattctgctatgcattgagttttccaggaataaaaccactctgcagttgtatggaaaattgggttttgtcttcaagaactttaccgaaggtcatttgccatttcattttttgtttggtttgttttgtttttttgagatg

SEQ ID NO: 5 - RNA, 1253 nt, Homo sapiens
  source 1..1253: mol_type = genomic RNA
catctcaaaaaaacaaaacaaaccaaacaaaaaatgaaatggcaaatgaccttcggtaaagttcttgaagacaaaacccaattttccatacaactgcagagtggttttattcctggaaaactcaatgcatagcagaatataagtattcaaaagaagtatggttacaacctgggcagcatagcgaaaccctgtctctacaacaaatacaaacgaattagtcaggcagaggagtgtgctactcgggaggctgaggtgggaggatcgcttgagccggggaggtcgaggctgtagtgagctgtgatcgtgctactgcactccaaccagcgacagagtgagagaccctgtctaaaaaaaaaaaaaaaggtgtgggtatatgggtaaaacagaaccattttccaggtctgagaattgcaaacatttcctcatgtatgtaattgcccagaaagacagaaggaaattgagagatgtgttcttgttgttggaaattccctattgtgtcagactgtcctacaccttacagggcatttagcttccctgacctgccatctatcaaatgccagaagccccagtcttgtgacaaccagaaatgacagtggccgcataaatttcaaaaaatgtcctctagggggcagtaacgctgctgtttggaacgagtgtccagcacgctctcagcacctgctgtttaatttaactctgtctttgagattgttttacataatgatatagagatctgcagccctcaccccccaccccacctggataggtcagggaatgccgccctttcaaggctgtgtggatttgtcacatggagatagggtcacgtacttaacagttccctttcacgggatgttctgctgttacaaagaaggctgcaatgaagaaggccaagctggtaccatcatttcacacttgtatgagcagatgactagagaaacgcttagaagtggcctggctggatcaagggtttggcgtttagaattttcatagctatggctaaaactaccttccatattaatccacgctgtcccagcagagctctgggacccaggctgggggacatgctggaaagtcttagccaggaccctctccctctaggggcccacctcctcagaccacacccagggccccccaataaagccttgggtgcctagacacttccagcccaccttctcaggccacagaggcagggggagacagggaggacttccccaaattgggctgatcccagctgttttatatatatatatatatat

SEQ ID NO: 6 - RNA, 600 nt, Homo sapiens
  source 1..600: mol_type = genomic RNA
gggccccacccctgtatctgcaccctgcctctggtacctgtgtgcgcaggcagcttagtgaggaggtccgtggtagcgttctccttggagaggcacttactctggatcaggtcacacacagtgtcttgggggcagcagtgcaggtgatcggagcagcaggtggcctgagtggggacaggggtgggtctttgtcacttccaggctcagtagcacacagggagcagccaggctgatggctggcactgccccaatcccccactagggggtagcatgaaccctgcatcagccaggctcccagcaagcagccagccagccccatgccacagagcccctgtaaggtgcgtgtcagggccaggtggctgggggcacacagccaagctggctccagcccctcactcacgttgggcattgggcagcagccatacttcccactgggcagctcacagcaggtagaaccatcagggcaccgggaccgtgcgtccggacacatgaccgagctggacaaggccactggaagaggagcaaacgtgaggggcagccaggatggaggaaactttttcctacacttggagtcaatgaggccccgccccagcccctggc

SEQ ID NO: 7 - RNA, 2705 nt, Mus sp.
  source 1..2705: mol_type = genomic RNA
tttagcgattccacattgtgtacatatatcaaaatatcatgttgtacaccataaatacagtttttttttaagtatcccaccgactatttttagtttttcttttttaatccaatgacataagcacagtttcctaaaatgggaactgaccctctcctacaaaacatttcattatggttatatcttcatgacatgaaaacaactagttgaaaagtgatgacttttttagtctattacctgactgttcagtaagaattggtttgactacttttttcaccccacattgaatttggttcactagtttagtggtccctcccccatgtcatccccacccagtatgtgtattatgttgtattttggggaagatacaaagagaaaaattgctttgctgttaattgaatttgggcaagctacttaatctctgccttctcacttcctgctatgaaatagagctgattatagaaagatggctgtctcatgcggctaagagagtatagccatctcatgggttaaatgaggtaacatgtaaagcacctggcacaaaaccaggacctaaataaacgtgtttttcctagctctgtggccacacttacctttttggttcctcctttctctgccctctctgccatgagacctttgcatgttctgttctcactacctgaagagctcttcctttcatctttgcctttttctggctaccagttaccctttcagcctttagattgctcaagcttgtttcctcaggtccagtcctagacctctaggcttataactgggataccagccttcagaggagtttgtggtttactggcttatagtaatgtaatgtgatgcttcatctcactctgcctccccaactagaaagtcagctccttcagggggaaggctgattttactcaccaccaccttcccagcacccagtgctgtttttgttgaaacagtaaaggatatgcgaatgctatgggaggagtaaaccagtttttgagttttttgcttgctataccagccttagttgtgagatggagccccttggtcaaaacaaatcaccacctgcactctggtcttctcacttaacaggggagaattgccacagttgtcttctgtggtcccgggcaactctgttctttgcctctttgtttccataaagatgaagcccatccagaaaaggtactcatgctggctgggagaggtggcatggggaaggggatggacagagcaatttggaagatcagagaggcctctgcccctacgaagggccatgcttgccaccagtcttcctgctgtgtggtgctcccatcgcacaggctgcttctggagatgctcgggttgttcaggccctgtggcttttggcaaggcaggagcatctgtgcttctgctgacataaaagagggtaataaaagtgacacaggaaagcggtgttgtgaggctttagtgatggtggagcagtgttgctgaagtccctcagggagtttggatttgattgcagtgagtctggctacatctgaagcctataatagtttacagtacaagatgctatgtataagatgtcaaacatttgcttggtagaatgctatgattgtcaggagtttacttttgcactgaaaatagtcttgttggtttggtgtaagtagagtcacattgcagcacacacacaggcattcatgcttttatgtttgttaattgtaaggaaatgttttctcaaggcaagagtcaaaggttagcagagtgccaaagaccttctcaaagaggaaagtctcattttagaaacttcattttgtacgccaaaacttgcctttcagtagtctcatgtaatgtttttgctgacatgagttgaaaagtgcattctgttgtaaaggaggaaaaaaactgaagaggaaccgtaagcgtgattatgaagaagagaaaagagcaggaagaaagtagacatcatcccagatttaaatttcatattgttaaaatcatttggttgcaagcagtagaaattttctataactaacttagataaacaaggacttgttggacacctgctgtccaacattcacaaaacctaaagaagaaaactgaactagatctagtgtggctagggatttcagggacaggaattaacaaatctcctgaggaggctgccatcaaaatgactgtgttaactgttgtccatcctggtgtattctactcacatttcagactcctgcgagaggctgattgacctggtttgaatctcgtgcctacccactcgtagtccctccagaccccagggggtgagcgaagggtgtttgcctgaaggaagagtggaacaggagctgggcagggaaaaaagaacagatgttcattctactggccacatagccacagtcagtggtaatgattttccctggccagacttggtggccagtagttactagtctcctttctcttcagaaacatctgctcttgtcagagttatagcctattcttgatgagctgcagcaaaaatgtaccacttaaattggagatggatcatttcctgaggatctcagaatatctttttcagttagctttataaagtaattgtccagatggccatttaatttgtgatatgggataaagtaatctaggggaaaaaacacttctttaaaatgactttttttttttgggggggccgggcacactggcttacacctgtaatcccagcactttgcgaggccaagctgggtggatcacctggggtc

SEQ ID NO: 8 - RNA, 364 nt, Mus sp.
  source 1..364: mol_type = genomic RNA
aggggagatgatggttaaaggatacagagcctcagagaagaggaaaactttcttttttctagttctattgcacagcatagtgaatatagtttatcgtgtatggtaccttccaaaatcgctgagtaaaatttcaatgttctcaccacaaaaataagtatttgaggtgatggatatgttaattagcatgattaaattattctacatgtattcataaatcataacatcactttatacctataaatttatacagctgtaatttgtcagtttacaaagataagtatgtgaggtaatgcctatatttatttagcgattccacattgtgtacatatatcaaaatatcatgttgtacaccataaatacagtt

SEQ ID NO: 9 - RNA, 482 nt, Mus sp.
  source 1..482: mol_type = genomic RNA
gggaaaaggatagtctctttaatgaattatgtttggaaaactggttatccacatgcagaagaatgaaatagcaccctgatatcagaccacatgatttccatatggaaaaatcaactcaaaatgagttaaagatttaacatgaatcctgaagttgtaaaactactagaaaaaaataggaaaaactacacaacattggtctgggcaatgatattttagatttggccccaaaagcacaggcaacaaaaacaaaaatagacaagattacatcaaactgaaaagcttctgcataaaaaggaaacaacagaatgaagagacatcatacagattgggagaaaatatttgtaagccatttatttgttaaagggttagtattaaaatatattaagaactcaactctatagaaagaaaataaataatccaatttaaaaatgggcaaggaacctgaatagacagacatttctcaaaagaagacatacagatag

SEQ ID NO: 10 - RNA, 20 nt, synthetic construct
  source 1..20: mol_type = other RNA
  modified_base 1..20: mod_base = OTHER; note = Phosphorothioate linkage
  modified_base 1..20: mod_base = OTHER; note = 2'-O-(2-methoxyethyl) ribonucleotide
  modified_base 1: mod_base = OTHER; note = 5-methyl cytidine
  modified_base 3..4: mod_base = OTHER; note = 5-methyl cytidine
  modified_base 18: mod_base = OTHER; note = 5-methyl cytidine
cacctagtggaagataacgg

SEQ ID NO: 11 - RNA, 20 nt, synthetic construct
  source 1..20: mol_type = other RNA
  modified_base 1..20: mod_base = OTHER; note = Phosphorothioate linkage
  modified_base 1..20: mod_base = OTHER; note = 2'-O-(2-methoxyethyl) ribonucleotide
  modified_base 1..3: mod_base = OTHER; note = 5-methyl cytidine
  modified_base 8: mod_base = OTHER; note = 5-methyl cytidine
  modified_base 10: mod_base = OTHER; note = 5-methyl cytidine
  modified_base 12: mod_base = OTHER; note = 5-methyl cytidine
cccttggcactcggagttgg

SEQ ID NO: 12 - RNA, 20 nt, synthetic construct
  source 1..20: mol_type = other RNA
  modified_base 1..20: mod_base = OTHER; note = Phosphorothioate linkage
  modified_base 1..20: mod_base = OTHER; note = 2'-O-(2-methoxyethyl) ribonucleotide
  modified_base 3: mod_base = OTHER; note = 5-methyl cytidine
  modified_base 12: mod_base = OTHER; note = 5-methyl cytidine
  modified_base 14..17: mod_base = OTHER; note = 5-methyl cytidine
agctaggttggctccccttt

SEQ ID NO: 13 - RNA, 20 nt, synthetic construct
  source 1..20: mol_type = other RNA
  modified_base 1..20: mod_base = OTHER; note = Phosphorothioate linkage
  modified_base 1..20: mod_base = OTHER; note = 2'-O-(2-methoxyethyl) ribonucleotide
  modified_base 2..4: mod_base = OTHER; note = 5-methyl cytidine
  modified_base 7..8: mod_base = OTHER; note = 5-methyl cytidine
  modified_base 16..17: mod_base = OTHER; note = 5-methyl cytidine
  modified_base 20: mod_base = OTHER; note = 5-methyl cytidine
tcccagccactttttcctgc

SEQ ID NO: 14 - RNA, 20 nt, synthetic construct
  source 1..20: mol_type = other RNA
  modified_base 1..20: mod_base = OTHER; note = Phosphorothioate linkage
  modified_base 1..20: mod_base = OTHER; note = 2'-O-(2-methoxyethyl) ribonucleotide
  modified_base 2..3: mod_base = OTHER; note = 5-methyl cytidine
  modified_base 5..6: mod_base = OTHER; note = 5-methyl cytidine
  modified_base 8: mod_base = OTHER; note = 5-methyl cytidine
  modified_base 10..12: mod_base = OTHER; note = 5-methyl cytidine
  modified_base 15..16: mod_base = OTHER; note = 5-methyl cytidine
  modified_base 18: mod_base = OTHER; note = 5-methyl cytidine
tccgcctctcccagccactt

SEQ ID NO: 15 - RNA, 20 nt, synthetic construct
  source 1..20: mol_type = other RNA
  modified_base 1..20: mod_base = OTHER; note = Phosphorothioate linkage
  modified_base 1..20: mod_base = OTHER; note = 2'-O-(2-methoxyethyl) ribonucleotide
  modified_base 3..4: mod_base = OTHER; note = 5-methyl cytidine
  modified_base 6..7: mod_base = OTHER; note = 5-methyl cytidine
  modified_base 9: mod_base = OTHER; note = 5-methyl cytidine
  modified_base 11..13: mod_base = OTHER; note = 5-methyl cytidine
  modified_base 16..17: mod_base = OTHER; note = 5-methyl cytidine
  modified_base 19: mod_base = OTHER; note = 5-methyl cytidine
ttccgcctctcccagccact

SEQ ID NO: 16 - RNA, 20 nt, synthetic construct
  source 1..20: mol_type = other RNA
  modified_base 1..20: mod_base = OTHER; note = Phosphorothioate linkage
  modified_base 1..20: mod_base = OTHER; note = 2'-O-(2-methoxyethyl) ribonucleotide
  modified_base 8: mod_base = OTHER; note = 5-methyl cytidine
  modified_base 12: mod_base = OTHER; note = 5-methyl cytidine
  modified_base 16: mod_base = OTHER; note = 5-methyl cytidine
  modified_base 19..20: mod_base = OTHER; note = 5-methyl cytidine
ggtgggacgagctagcttcc

SEQ ID NO: 17 - RNA, 20 nt, synthetic construct
  source 1..20: mol_type = other RNA
  modified_base 1..20: mod_base = OTHER; note = Phosphorothioate linkage
  modified_base 1..20: mod_base = OTHER; note = 2'-O-(2-methoxyethyl) ribonucleotide
  modified_base 4: mod_base = OTHER; note = 5-methyl cytidine
  modified_base 7..8: mod_base = OTHER; note = 5-methyl cytidine
  modified_base 10: mod_base = OTHER; note = 5-methyl cytidine
  modified_base 17: mod_base = OTHER; note = 5-methyl cytidine
ttacttcctcttgttgcggg

SEQ ID NO: 18 - RNA, 20 nt, synthetic construct
  source 1..20: mol_type = other RNA
  modified_base 1..20: mod_base = OTHER; note = Phosphorothioate linkage
  modified_base 1..20: mod_base = OTHER; note = 2'-O-(2-methoxyethyl) ribonucleotide
  modified_base 2: mod_base = OTHER; note = 5-methyl cytidine
  modified_base 6: mod_base = OTHER; note = 5-methyl cytidine
  modified_base 8..9: mod_base = OTHER; note = 5-methyl cytidine
  modified_base 11..12: mod_base = OTHER; note = 5-methyl cytidine
  modified_base 16: mod_base = OTHER; note = 5-methyl cytidine
  modified_base 19..20: mod_base = OTHER; note = 5-methyl cytidine
tctggctcctccttacttcc

SEQ ID NO: 19 - RNA, 20 nt, synthetic construct
  source 1..20: mol_type = other RNA
  modified_base 1..20: mod_base = OTHER; note = Phosphorothioate linkage
  modified_base 1..20: mod_base = OTHER; note = 2'-O-(2-methoxyethyl) ribonucleotide
  modified_base 5: mod_base = OTHER; note = 5-methyl cytidine
  modified_base 10..11: mod_base = OTHER; note = 5-methyl cytidine
  modified_base 16: mod_base = OTHER; note = 5-methyl cytidine
  modified_base 20: mod_base = OTHER; note = 5-methyl cytidine
gtgactgaacctggtctggc

SEQ ID NO: 20 - RNA, 20 nt, synthetic construct
  source 1..20: mol_type = other RNA
  modified_base 1..20: mod_base = OTHER; note = Phosphorothioate linkage
  modified_base 1..20: mod_base = OTHER; note = 2'-O-(2-methoxyethyl) ribonucleotide
  modified_base 4: mod_base = OTHER; note = 5-methyl cytidine
  modified_base 18: mod_base = OTHER; note = 5-methyl cytidine
ggacttgggagtggtgactg

SEQ ID NO: 21 - RNA, 20 nt, synthetic construct
  source 1..20: mol_type = other RNA
  modified_base 1..20: mod_base = OTHER; note = Phosphorothioate linkage
  modified_base 1..20: mod_base = OTHER; note = 2'-O-(2-methoxyethyl) ribonucleotide
  modified_base 2: mod_base = OTHER; note = 5-methyl cytidine
  modified_base 5: mod_base = OTHER; note = 5-methyl cytidine
  modified_base 7: mod_base = OTHER; note = 5-methyl cytidine
gcttctcgaaggtagtaggg

SEQ ID NO: 22 - RNA, 20 nt, synthetic construct
  source 1..20: mol_type = other RNA
  modified_base 1..20: mod_base = OTHER; note = Phosphorothioate linkage
  modified_base 1..20: mod_base = OTHER; note = 2'-O-(2-methoxyethyl) ribonucleotide
  modified_base 5..6: mod_base = OTHER; note = 5-methyl cytidine
  modified_base 12..13: mod_base = OTHER; note = 5-methyl cytidine
  modified_base 18: mod_base = OTHER; note = 5-methyl cytidine
gagacctgagaccttggctt

SEQ ID NO: 23 - RNA, 20 nt, synthetic construct
  source 1..20: mol_type = other RNA
  modified_base 1..20: mod_base = OTHER; note = Phosphorothioate linkage
  modified_base 1..20: mod_base = OTHER; note = 2'-O-(2-methoxyethyl) ribonucleotide
  modified_base 3..4: mod_base = OTHER; note = 5-methyl cytidine
  modified_base 11: mod_base = OTHER; note = 5-methyl cytidine
  modified_base 16..17: mod_base = OTHER; note = 5-methyl cytidine
ggcctgggaacgagacctga

SEQ ID NO: 24 - RNA, 20 nt, synthetic construct
  source 1..20: mol_type = other RNA
  modified_base 1..20: mod_base = OTHER; note = Phosphorothioate linkage
  modified_base 1..20: mod_base = OTHER; note = 2'-O-(2-methoxyethyl) ribonucleotide
  modified_base 1: mod_base = OTHER; note = 5-methyl cytidine
  modified_base 20: mod_base = OTHER; note = 5-methyl cytidine
ctggtggtggtgggtggttc

SEQ ID NO: 25 - RNA, 20 nt, synthetic construct
  source 1..20: mol_type = other RNA
  modified_base 1..20: mod_base = OTHER; note = Phosphorothioate linkage
  modified_base 1..20: mod_base = OTHER; note = 2'-O-(2-methoxyethyl) ribonucleotide
  modified_base 2..5: mod_base = OTHER; note = 5-methyl cytidine
  modified_base 9: mod_base = OTHER; note = 5-methyl cytidine
  modified_base 18: mod_base = OTHER; note = 5-methyl cytidine
acccctgtcggtaggtgctg

SEQ ID NO: 26 - RNA, 20 nt, synthetic construct
  source 1..20: mol_type = other RNA
  modified_base 1..20: mod_base = OTHER; note = Phosphorothioate linkage
  modified_base 1..20: mod_base = OTHER; note = 2'-O-(2-methoxyethyl) ribonucleotide
  modified_base 4..5: mod_base = OTHER; note = 5-methyl cytidine
  modified_base 7: mod_base = OTHER; note = 5-methyl cytidine
  modified_base 9..10: mod_base = OTHER; note = 5-methyl cytidine
  modified_base 14: mod_base = OTHER; note = 5-methyl cytidine
  modified_base 19..20: mod_base = OTHER; note = 5-methyl cytidine
ggaccacaccattcttgacc

SEQ ID NO: 27 - RNA, 20 nt, synthetic construct
  source 1..20: mol_type = other RNA
  modified_base 1..20: mod_base = OTHER; note = Phosphorothioate linkage
  modified_base 1..20: mod_base = OTHER; note = 2'-O-(2-methoxyethyl) ribonucleotide
  modified_base 3: mod_base = OTHER; note = 5-methyl cytidine
  modified_base 7: mod_base = OTHER; note = 5-methyl cytidine
  modified_base 10..11: mod_base = OTHER; note = 5-methyl cytidine
  modified_base 13..16: mod_base = OTHER; note = 5-methyl cytidine
  modified_base 19: mod_base = OTHER; note = 5-methyl cytidine
ggctttctacctccccagca

SEQ ID NO: 28 - RNA, 20 nt, synthetic construct
  source 1..20: mol_type = other RNA
  modified_base 1..20: mod_base = OTHER; note = Phosphorothioate linkage
  modified_base 1..20: mod_base = OTHER; note = 2'-O-(2-methoxyethyl) ribonucleotide
  modified_base 2..3: mod_base = OTHER; note = 5-methyl cytidine
  modified_base 5: mod_base = OTHER; note = 5-methyl cytidine
  modified_base 11: mod_base = OTHER; note = 5-methyl cytidine
  modified_base 13..16: mod_base = OTHER; note = 5-methyl cytidine
attgcagtgacgccccgtta

SEQ ID NO: 29 - RNA, 20 nt, synthetic construct
  source 1..20: mol_type = other RNA
  modified_base 1..20: mod_base = OTHER; note = Phosphorothioate linkage
  modified_base 1..20: mod_base = OTHER; note = 2'-O-(2-methoxyethyl) ribonucleotide
  modified_base 20: mod_base = OTHER; note = 5-methyl cytidine
ttttatgggaaagaggaagc

SEQ ID NO: 30 - RNA, 20 nt, synthetic construct
  source 1..20: mol_type = other RNA
  modified_base 1..20: mod_base = OTHER; note = Phosphorothioate linkage
  modified_base 1..20: mod_base = OTHER; note = 2'-O-(2-methoxyethyl) ribonucleotide
  modified_base 1..3: mod_base = OTHER; note = 5-methyl cytidine
  modified_base 7: mod_base = OTHER; note = 5-methyl cytidine
  modified_base 13: mod_base = OTHER; note = 5-methyl cytidine
  modified_base 15..16: mod_base = OTHER; note = 5-methyl cytidine
cgcttactgaaactccttgg

SEQ ID NO: 31 - RNA, 20 nt, synthetic construct
  source 1..20: mol_type = other RNA
  modified_base 1..20: mod_base = OTHER; note = Phosphorothioate linkage
  modified_base 1..20: mod_base = OTHER; note = 2'-O-(2-methoxyethyl) ribonucleotide
  modified_base 8..9: mod_base = OTHER; note = 5-methyl cytidine
  modified_base 11: mod_base = OTHER; note = 5-methyl cytidine
  modified_base 15: mod_base = OTHER; note = 5-methyl cytidine
agaagaaccgcttactgaaa

SEQ ID NO: 32 - RNA, 20 nt, synthetic construct
  source 1..20: mol_type = other RNA
  modified_base 1..20: mod_base = OTHER; note = Phosphorothioate linkage
  modified_base 1..20: mod_base = OTHER; note = 2'-O-(2-methoxyethyl) ribonucleotide
  modified_base 1: mod_base = OTHER; note = 5-methyl cytidine
  modified_base 7: mod_base = OTHER; note = 5-methyl cytidine
  modified_base 10: mod_base = OTHER; note = 5-methyl cytidine
  modified_base 18..19: mod_base = OTHER; note = 5-methyl cytidine
cggagacaacagaagaaccg

SEQ ID NO: 33 - RNA, 20 nt, synthetic construct
  source 1..20: mol_type = other RNA
  modified_base 1..20: mod_base = OTHER; note = Phosphorothioate linkage
  modified_base 1..20: mod_base = OTHER; note = 2'-O-(2-methoxyethyl) ribonucleotide
  modified_base 3..6: mod_base = OTHER; note = 5-methyl cytidine
  modified_base 13: mod_base = OTHER; note = 5-methyl cytidine
  modified_base 15: mod_base = OTHER; note = 5-methyl cytidine
  modified_base 18..19: mod_base = OTHER; note = 5-methyl cytidine
ttcccctggagtctcagccg

SEQ ID NO: 34 - RNA, 20 nt, synthetic construct
  source 1..20: mol_type = other RNA
  modified_base 1..20: mod_base = OTHER; note = Phosphorothioate linkage
  modified_base 1..20: mod_base = OTHER; note = 2'-O-(2-methoxyethyl) ribonucleotide
  modified_base 3..4: mod_base = OTHER; note = 5-methyl cytidine
  modified_base 12: mod_base = OTHER; note = 5-methyl cytidine
ggccatgtgagcttgaggtt

SEQ ID NO: 35 - RNA, 20 nt, synthetic construct
  source 1..20: mol_type = other RNA
  modified_base 1..20: mod_base = OTHER; note = Phosphorothioate linkage
  modified_base 1..20: mod_base = OTHER; note = 2'-O-(2-methoxyethyl) ribonucleotide
  modified_base 4..5: mod_base = OTHER; note = 5-methyl cytidine
  modified_base 7: mod_base = OTHER; note = 5-methyl cytidine
  modified_base 9: mod_base = OTHER; note = 5-methyl cytidine
  modified_base 11..12: mod_base = OTHER; note = 5-methyl cytidine
  modified_base 15: mod_base = OTHER; note = 5-methyl cytidine
  modified_base 17..18: mod_base = OTHER; note = 5-methyl cytidine
agacctctcgcctgctcctg

SEQ ID NO: 36 - RNA, 20 nt, synthetic construct
  source 1..20: mol_type = other RNA
  modified_base 1..20: mod_base = OTHER; note = Phosphorothioate linkage
  modified_base 1..20: mod_base = OTHER; note = 2'-O-(2-methoxyethyl) ribonucleotide
  modified_base 4: mod_base = OTHER; note = 5-methyl cytidine
  modified_base 8: mod_base = OTHER; note = 5-methyl cytidine
  modified_base 10: mod_base = OTHER; note = 5-methyl cytidine
agtcggacgcaggtaggaga

SEQ ID NO: 37 - RNA, 20 nt, synthetic construct
  source 1..20: mol_type = other RNA
  modified_base 1..20: mod_base = OTHER; note = Phosphorothioate linkage
  modified_base 1..20: mod_base = OTHER; note = 2'-O-(2-methoxyethyl) ribonucleotide
  modified_base 3..5: mod_base = OTHER; note = 5-methyl cytidine
  modified_base 11: mod_base = OTHER; note = 5-methyl cytidine
  modified_base 14: mod_base = OTHER; note = 5-methyl cytidine
  modified_base 17..19: mod_base = OTHER; note = 5-methyl cytidine
tacccggttgctgctgccca

SEQ ID NO: 38 - RNA, 20 nt, synthetic construct
  source 1..20: mol_type = other RNA
  modified_base 1..20: mod_base = OTHER; note = Phosphorothioate linkage
  modified_base 1..20: mod_base = OTHER; note = 2'-O-(2-methoxyethyl) ribonucleotide
  modified_base 4: mod_base = OTHER; note = 5-methyl cytidine
  modified_base 11: mod_base = OTHER; note = 5-methyl cytidine
  modified_base 16: mod_base = OTHER; note = 5-methyl cytidine
  modified_base 18: mod_base = OTHER; note = 5-methyl cytidine
ggtctgtagtctgagcgcta

SEQ ID NO: 39 - RNA, 20 nt, synthetic construct
  source 1..20: mol_type = other RNA
  modified_base 1..20: mod_base = OTHER; note = Phosphorothioate linkage
  modified_base 1..20: mod_base = OTHER; note = 2'-O-(2-methoxyethyl) ribonucleotide
  modified_base 9: mod_base = OTHER; note = 5-methyl cytidine
  modified_base 19: mod_base = OTHER; note = 5-methyl cytidine
aatggaaactgaggtaggcg

SEQ ID NO: 40 - RNA, 20 nt, synthetic construct
  source 1..20: mol_type = other RNA
  modified_base 1..20: mod_base = OTHER; note = Phosphorothioate linkage
  modified_base 1..20: mod_base = OTHER; note = 2'-O-(2-methoxyethyl) ribonucleotide
  modified_base 8..9: mod_base = OTHER; note = 5-methyl cytidine
  modified_base 18: mod_base = OTHER; note = 5-methyl cytidine
taagtagccaatgggagcgg

SEQ ID NO: 41 - RNA, 20 nt, synthetic construct
  source 1..20: mol_type = other RNA
  modified_base 1..20: mod_base = OTHER; note = Phosphorothioate linkage
  modified_base 1..20: mod_base = OTHER; note = 2'-O-(2-methoxyethyl) ribonucleotide
  modified_base 3..6: mod_base = OTHER; note = 5-methyl cytidine
  modified_base 8..9: mod_base = OTHER; note = 5-methyl cytidine
  modified_base 11: mod_base = OTHER; note = 5-methyl cytidine
ggccccacctctatattgat

SEQ ID NO: 42 - RNA, 20 nt, synthetic construct
  source 1..20: mol_type = other RNA
  modified_base 1..20: mod_base = OTHER; note = Phosphorothioate linkage
  modified_base 1..20: mod_base = OTHER; note = 2'-O-(2-methoxyethyl) ribonucleotide
  modified_base 6: mod_base = OTHER; note = 5-methyl cytidine
  modified_base 8: mod_base = OTHER; note = 5-methyl cytidine
  modified_base 11: mod_base = OTHER; note = 5-methyl cytidine
  modified_base 15..16: mod_base = OTHER; note = 5-methyl cytidine
  modified_base 20: mod_base = OTHER; note = 5-methyl cytidine
agaaacacagcattccaggc

SEQ ID NO: 43 - RNA, 20 nt, synthetic construct
  source 1..20: mol_type = other RNA
  modified_base 1..20: mod_base = OTHER; note = Phosphorothioate linkage
  modified_base 1..20: mod_base = OTHER; note = 2'-O-(2-methoxyethyl) ribonucleotide
  modified_base 7: mod_base = OTHER; note = 5-methyl cytidine
  modified_base 9: mod_base = OTHER; note = 5-methyl cytidine
  modified_base 12: mod_base = OTHER; note = 5-methyl cytidine
  modified_base 16..17: mod_base = OTHER; note = 5-methyl cytidine
aagaaacacagcattccagg

SEQ ID NO: 44 - RNA, 20 nt, synthetic construct
  source 1..20: mol_type = other RNA
  modified_base 1..20: mod_base = OTHER; note = Phosphorothioate linkage
  modified_base 1..20: mod_base = OTHER; note = 2'-O-(2-methoxyethyl) ribonucleotide
  modified_base 10: mod_base = OTHER; note = 5-methyl cytidine
  modified_base 12: mod_base = OTHER; note = 5-methyl cytidine
  modified_base 15: mod_base = OTHER; note = 5-methyl cytidine
  modified_base 19..20: mod_base = OTHER; note = 5-methyl cytidine
gaaaagaaacacagcattcc

SEQ ID NO: 45 - RNA, 20 nt, synthetic construct
  source 1..20: mol_type = other RNA
  modified_base 1..20: mod_base = OTHER; note = Phosphorothioate linkage
  modified_base 1..20: mod_base = OTHER; note = 2'-O-(2-methoxyethyl) ribonucleotide
  modified_base 12: mod_base = OTHER; note = 5-methyl cytidine
  modified_base 14: mod_base = OTHER; note = 5-methyl cytidine
  modified_base 17: mod_base = OTHER; note = 5-methyl cytidine
tagaaaagaaacacagcatt

SEQ ID NO: 46 - RNA, 20 nt, synthetic construct
  source 1..20: mol_type = other RNA
  modified_base 1..20: mod_base = OTHER; note = Phosphorothioate linkage
  modified_base 1..20: mod_base = OTHER; note = 2'-O-(2-methoxyethyl) ribonucleotide
gggaggagagtgatttgagt

SEQ ID NO: 47 - RNA, 20 nt, synthetic construct
  source 1..20: mol_type = other RNA
  modified_base 1..20: mod_base = OTHER; note = Phosphorothioate linkage
  modified_base 1..20: mod_base = OTHER; note = 2'-O-(2-methoxyethyl) ribonucleotide
  modified_base 2: mod_base = OTHER; note = 5-methyl cytidine
  modified_base 4: mod_base = OTHER; note = 5-methyl cytidine
  modified_base 10..12: mod_base = OTHER; note = 5-methyl cytidine
tcacatgatccctagaaatg

SEQ ID NO: 48 - RNA, 20 nt, synthetic construct
  source 1..20: mol_type = other RNA
  modified_base 1..20: mod_base = OTHER; note = Phosphorothioate linkage
  modified_base 1..20: mod_base = OTHER; note = 2'-O-(2-methoxyethyl) ribonucleotide
  modified_base 3: mod_base = OTHER; note = 5-methyl cytidine
  modified_base 5: mod_base = OTHER; note = 5-methyl cytidine
  modified_base 11..13: mod_base = OTHER; note = 5-methyl cytidine
atcacatgatccctagaaat

SEQ ID NO: 49 - RNA, 20 nt, synthetic construct
  source 1..20: mol_type = other RNA
  modified_base 1..20: mod_base = OTHER; note = Phosphorothioate linkage
  modified_base 1..20: mod_base = OTHER; note = 2'-O-(2-methoxyethyl) ribonucleotide
  modified_base 1..2: mod_base = OTHER; note = 5-methyl cytidine
  modified_base 6: mod_base = OTHER; note = 5-methyl cytidine
  modified_base 8: mod_base = OTHER; note = 5-methyl cytidine
  modified_base 14..16: mod_base = OTHER; note = 5-methyl cytidine
ccaatcacatgatccctaga

SEQ ID NO: 50 - RNA, 20 nt, synthetic construct
  source 1..20: mol_type = other RNA
  modified_base 1..20: mod_base = OTHER; note = Phosphorothioate linkage
  modified_base 1..20: mod_base = OTHER; note = 2'-O-(2-methoxyethyl) ribonucleotide
  modified_base 1: mod_base = OTHER; note = 5-methyl cytidine
  modified_base 5..7: mod_base = OTHER; note = 5-methyl cytidine
  modified_base 10: mod_base = OTHER; note = 5-methyl cytidine
  modified_base 13: mod_base = OTHER; note = 5-methyl cytidine
  modified_base 15: mod_base = OTHER; note = 5-methyl cytidine
ctgtcccgacgtcacatgat

SEQ ID NO: 51 - RNA, 20 nt, synthetic construct
  source 1..20: mol_type = other RNA
  modified_base 1..20: mod_base = OTHER; note = Phosphorothioate linkage
  modified_base 1..20: mod_base = OTHER; note = 2'-O-(2-methoxyethyl) ribonucleotide
  modified_base 15: mod_base = OTHER; note = 5-methyl cytidine
  modified_base 18: mod_base = OTHER; note = 5-methyl cytidine
tgggttaaggaaggcgacga

SEQ ID NO: 52 - RNA, 20 nt, synthetic construct
  source 1..20: mol_type = other RNA
  modified_base 1..20: mod_base = OTHER; note = Phosphorothioate linkage
  modified_base 1..20: mod_base = OTHER; note = 2'-O-(2-methoxyethyl) ribonucleotide
  modified_base 2..3: mod_base = OTHER; note = 5-methyl cytidine
  modified_base 6: mod_base = OTHER; note = 5-methyl cytidine
gcctgcaggatgggttaagg

SEQ ID NO: 53 - RNA, 20 nt, synthetic construct
  source 1..20: mol_type = other RNA
  modified_base 1..20: mod_base = OTHER; note = Phosphorothioate linkage
  modified_base 1..20: mod_base = OTHER; note = 2'-O-(2-methoxyethyl) ribonucleotide
  modified_base 4: mod_base = OTHER; note = 5-methyl cytidine
  modified_base 7: mod_base = OTHER; note = 5-methyl cytidine
  modified_base 9: mod_base = OTHER; note = 5-methyl cytidine
  modified_base 13: mod_base = OTHER; note = 5-methyl cytidine
  modified_base 17: mod_base = OTHER; note = 5-methyl cytidine
  modified_base 19..20: mod_base = OTHER; note = 5-methyl cytidine
tatcatctctagcaaactcc

SEQ ID NO: 54 - RNA, 20 nt, synthetic construct
  source 1..20: mol_type = other RNA
  modified_base 1..20: mod_base = OTHER; note = Phosphorothioate linkage
  modified_base 1..20: mod_base = OTHER; note = 2'-O-(2-methoxyethyl) ribonucleotide
  modified_base 2: mod_base = OTHER; note = 5-methyl cytidine
  modified_base 4: mod_base = OTHER; note = 5-methyl cytidine
  modified_base 7: mod_base = OTHER; note = 5-methyl cytidine
  modified_base 9: mod_base = OTHER; note = 5-methyl cytidine
  modified_base 13: mod_base = OTHER; note = 5-methyl cytidine
  modified_base 17: mod_base = OTHER; note = 5-methyl cytidine
  modified_base 19..20: mod_base = OTHER; note = 5-methyl cytidine
acacgcgctatcatctctag

SEQ ID NO: 55 - RNA, 20 nt, synthetic construct
  source 1..20: mol_type = other RNA
  modified_base 1..20: mod_base = OTHER; note = Phosphorothioate linkage
  modified_base 1..20: mod_base = OTHER; note = 2'-O-(2-methoxyethyl) ribonucleotide
  modified_base 2: mod_base = OTHER; note = 5-methyl cytidine
  modified_base 4: mod_base = OTHER; note = 5-methyl cytidine
  modified_base 8: mod_base = OTHER; note = 5-methyl cytidine
  modified_base 13..16: mod_base = OTHER; note = 5-methyl cytidine
  modified_base 20: mod_base = OTHER; note = 5-methyl cytidine
gcactgtcaatgccccagac

SEQ ID NO: 56 - RNA, 20 nt, synthetic construct
  source 1..20: mol_type = other RNA
  modified_base 1..20: mod_base = OTHER; note = Phosphorothioate linkage
  modified_base 1..20: mod_base = OTHER; note = 2'-O-(2-methoxyethyl) ribonucleotide
  modified_base 5: mod_base = OTHER; note = 5-methyl cytidine
  modified_base 10: mod_base = OTHER; note = 5-methyl cytidine
  modified_base 12: mod_base = OTHER; note = 5-methyl cytidine
  modified_base 14..16: mod_base = OTHER; note = 5-methyl cytidine
  modified_base 18: mod_base = OTHER; note = 5-methyl cytidine
  modified_base 20: mod_base = OTHER; note = 5-methyl cytidine
aattcataacactccctcgc

SEQ ID NO: 57 - RNA, 20 nt, synthetic construct
  source 1..20: mol_type = other RNA
  modified_base 1..20: mod_base = OTHER; note = Phosphorothioate linkage
  modified_base 1..20: mod_base = OTHER; note = 2'-O-(2-methoxyethyl) ribonucleotide
  modified_base 12: mod_base = OTHER; note = 5-methyl cytidine
  modified_base 16: mod_base = OTHER; note = 5-methyl cytidine
  modified_base 18: mod_base = OTHER; note = 5-methyl cytidine
ggatagaaaggcgagcacaa

SEQ ID NO: 58 - RNA, 20 nt, synthetic construct
  source 1..20: mol_type = other RNA
  modified_base 1..20: mod_base = OTHER; note = Phosphorothioate linkage
  modified_base 1..20: mod_base = OTHER; note = 2'-O-(2-methoxyethyl) ribonucleotide
  modified_base 3: mod_base = OTHER; note = 5-methyl cytidine
  modified_base 7: mod_base = OTHER; note = 5-methyl cytidine
  modified_base 9: mod_base = OTHER; note = 5-methyl cytidine
  modified_base 11: mod_base = OTHER; note = 5-methyl cytidine
  modified_base 16..17: mod_base = OTHER; note = 5-methyl cytidine
aacaaacacacaagtccggg

SEQ ID NO: 59 - RNA, 20 nt, synthetic construct
  source 1..20: mol_type = other RNA
  modified_base 1..20: mod_base = OTHER; note = Phosphorothioate linkage
  modified_base 1..20: mod_base = OTHER; note = 2'-O-(2-methoxyethyl) ribonucleotide
  modified_base 10: mod_base = OTHER; note = 5-methyl cytidine
  modified_base 12: mod_base = OTHER; note = 5-methyl cytidine
taggagaatcgctttgggag

SEQ ID NO: 60 - RNA, 20 nt, synthetic construct
  source 1..20: mol_type = other RNA
  modified_base 1..20: mod_base = OTHER; note = Phosphorothioate linkage
  modified_base 1..20: mod_base = OTHER; note = 2'-O-(2-methoxyethyl) ribonucleotide
  modified_base 15: mod_base = OTHER; note = 5-methyl cytidine
  modified_base 19..20: mod_base = OTHER; note = 5-methyl cytidine
ggataggataggagcgagcc

SEQ ID NO: 61 - RNA, 20 nt, synthetic construct
  source 1..20: mol_type = other RNA
  modified_base 1..20: mod_base = OTHER; note = Phosphorothioate linkage
  modified_base 1..20: mod_base = OTHER; note = 2'-O-(2-methoxyethyl) ribonucleotide
  modified_base 4: mod_base = OTHER; note = 5-methyl cytidine
  modified_base 9: mod_base = OTHER; note = 5-methyl cytidine
  modified_base 12..13: mod_base = OTHER; note = 5-methyl cytidine
tagcatgtcaaccgagtttg

SEQ ID NO: 62 - RNA, 20 nt, synthetic construct
  source 1..20: mol_type = other RNA
  modified_base 1..20: mod_base = OTHER; note = Phosphorothioate linkage
  modified_base 1..20: mod_base = OTHER; note = 2'-O-(2-methoxyethyl) ribonucleotide
  modified_base 3..4: mod_base = OTHER; note = 5-methyl cytidine
  modified_base 7: mod_base = OTHER; note = 5-methyl cytidine
  modified_base 10: mod_base = OTHER; note = 5-methyl cytidine
  modified_base 12: mod_base = OTHER; note = 5-methyl cytidine
  modified_base 14: mod_base = OTHER; note = 5-methyl cytidine
  modified_base 16: mod_base = OTHER; note = 5-methyl cytidine
atccttcaactcactctggg

SEQ ID NO: 63 - RNA, 20 nt, synthetic construct
  source 1..20: mol_type = other RNA
  modified_base 1..20: mod_base = OTHER; note = Phosphorothioate linkage
  modified_base 1..20: mod_base = OTHER; note = 2'-O-(2-methoxyethyl) ribonucleotide
  modified_base 2: mod_base = OTHER; note = 5-methyl cytidine
  modified_base 10: mod_base = OTHER; note = 5-methyl cytidine
  modified_base 16..17: mod_base = OTHER; note = 5-methyl cytidine
gctgtttatctttgtcctgg

SEQ ID NO: 64 - RNA, 20 nt, synthetic construct
  source 1..20: mol_type = other RNA
  modified_base 1..20: mod_base = OTHER; note = Phosphorothioate linkage
  modified_base 1..20: mod_base = OTHER; note = 2'-O-(2-methoxyethyl) ribonucleotide
  modified_base 3..4: mod_base = OTHER; note = 5-methyl cytidine
  modified_base 7: mod_base = OTHER; note = 5-methyl cytidine
  modified_base 12: mod_base = OTHER; note = 5-methyl cytidine
  modified_base 14..15: mod_base = OTHER; note = 5-methyl cytidine
gtcctgctgagcaccttgag

SEQ ID NO: 65 - RNA, 20 nt, synthetic construct
  source 1..20: mol_type = other RNA
  modified_base 1..20: mod_base = OTHER; note = Phosphorothioate linkage
  modified_base 1..20: mod_base = OTHER; note = 2'-O-(2-methoxyethyl) ribonucleotide
  modified_base 4: mod_base = OTHER; note = 5-methyl cytidine
  modified_base 8: mod_base = OTHER; note = 5-methyl cytidine
  modified_base 10..12: mod_base = OTHER; note = 5-methyl cytidine
  modified_base 14..15: mod_base = OTHER; note = 5-methyl cytidine
  modified_base 19..20: mod_base = OTHER; note = 5-methyl cytidine
agactgtctcccaccaatcc

SEQ ID NO: 66 - RNA, 20 nt, synthetic construct
  source 1..20: mol_type = other RNA
  modified_base 1..20: mod_base = OTHER; note = Phosphorothioate linkage
  modified_base 1..20: mod_base = OTHER; note = 2'-O-(2-methoxyethyl) ribonucleotide
  modified_base 1: mod_base = OTHER; note = 5-methyl cytidine
  modified_base 14: mod_base = OTHER; note = 5-methyl cytidine
  modified_base 17..18: mod_base = OTHER; note = 5-methyl cytidine
cttaaattagattcagcctg

SEQ ID NO: 67 - RNA, 20 nt, synthetic construct
  source 1..20: mol_type = other RNA
  modified_base 1..20: mod_base = OTHER; note = Phosphorothioate linkage
  modified_base 1..20: mod_base = OTHER; note = 2'-O-(2-methoxyethyl) ribonucleotide
  modified_base 1: mod_base = OTHER; note = 5-methyl cytidine
  modified_base 5: mod_base = OTHER; note = 5-methyl cytidine
  modified_base 7: mod_base = OTHER; note = 5-methyl cytidine
  modified_base 9: mod_base = OTHER; note = 5-methyl cytidine
  modified_base 12..13: mod_base = OTHER; note = 5-methyl cytidine
  modified_base 20: mod_base = OTHER; note = 5-methyl cytidine
ctggcgcacaaccttgtatc

SEQ ID NO: 68 - RNA, 20 nt, synthetic construct
  source 1..20: mol_type = other RNA
  modified_base 1..20: mod_base = OTHER; note = Phosphorothioate linkage
  modified_base 1..20: mod_base = OTHER; note = 2'-O-(2-methoxyethyl) ribonucleotide
  modified_base 2: mod_base = OTHER; note = 5-methyl cytidine
  modified_base 4..6: mod_base = OTHER; note = 5-methyl cytidine
  modified_base 9: mod_base = OTHER; note = 5-methyl cytidine
  modified_base 11..12: mod_base = OTHER; note = 5-methyl cytidine
  modified_base 16: mod_base = OTHER; note = 5-methyl cytidine
  modified_base 19: mod_base = OTHER; note = 5-methyl cytidine
tctccctacacctggcaact

SEQ ID NO: 69 - RNA, 20 nt, synthetic construct
  source 1..20: mol_type = other RNA
  modified_base 1..20: mod_base = OTHER; note = Phosphorothioate linkage
  modified_base 1..20: mod_base = OTHER; note = 2'-O-(2-methoxyethyl) ribonucleotide
  modified_base 1..3: mod_base = OTHER; note = 5-methyl cytidine
  modified_base 5..6: mod_base = OTHER; note = 5-methyl cytidine
  modified_base 13: mod_base = OTHER; note = 5-methyl cytidine
  modified_base 17: mod_base = OTHER; note = 5-methyl cytidine
  modified_base 20: mod_base = OTHER; note = 5-methyl cytidine
cccacctggagacaatctac

SEQ ID NO: 70 - RNA, 20 nt, synthetic construct
  source 1..20: mol_type = other RNA
  modified_base 1..20: mod_base = OTHER; note = Phosphorothioate linkage
  modified_base 1..20: mod_base = OTHER; note = 2'-O-(2-methoxyethyl) ribonucleotide
  modified_base 5: mod_base = OTHER; note = 5-methyl cytidine
  modified_base 7..8: mod_base = OTHER; note = 5-methyl cytidine
gatgctcctaaggtggaatg

SEQ ID NO: 71 - RNA, 20 nt, synthetic construct
  source 1..20: mol_type = other RNA
  modified_base 1..20: mod_base = OTHER; note = Phosphorothioate linkage
  modified_base 1..20: mod_base = OTHER; note = 2'-O-(2-methoxyethyl) ribonucleotide
  modified_base 1..2: mod_base = OTHER; note = 5-methyl cytidine
  modified_base 6: mod_base = OTHER; note = 5-methyl cytidine
  modified_base 8: mod_base = OTHER; note = 5-methyl cytidine
  modified_base 11: mod_base = OTHER; note = 5-methyl cytidine
  modified_base 13: mod_base = OTHER; note = 5-methyl cytidine
ccagactcagctcaaggaga

SEQ ID NO: 72 - RNA, 20 nt, synthetic construct
  source 1..20: mol_type = other RNA
  modified_base 1..20: mod_base = OTHER; note = Phosphorothioate linkage
  modified_base 1..20: mod_base = OTHER; note = 2'-O-(2-methoxyethyl) ribonucleotide
  modified_base 2..3: mod_base = OTHER; note = 5-methyl cytidine
  modified_base 6..7: mod_base = OTHER; note = 5-methyl cytidine
  modified_base 17: mod_base = OTHER; note = 5-methyl cytidine
  modified_base 20: mod_base = OTHER; note = 5-methyl cytidine
acctgccagttaaaatcttc

SEQ ID NO: 73 - RNA, 20 nt, synthetic construct
  source 1..20: mol_type = other RNA
  modified_base 1..20: mod_base = OTHER; note = Phosphorothioate linkage
  modified_base 1..20: mod_base = OTHER; note = 2'-O-(2-methoxyethyl) ribonucleotide
  modified_base 3: mod_base = OTHER; note = 5-methyl cytidine
  modified_base 5: mod_base = OTHER; note = 5-methyl cytidine
  modified_base 8..10: mod_base = OTHER; note = 5-methyl cytidine
  modified_base 13: mod_base = OTHER; note = 5-methyl cytidine
  modified_base 15..16: mod_base = OTHER; note = 5-methyl cytidine
  modified_base 18..19: mod_base = OTHER; note = 5-methyl cytidine
ggctcttcccaacacctcct

SEQ ID NO: 74 - RNA, 20 nt, synthetic construct
  source 1..20: mol_type = other RNA
  modified_base 1..20: mod_base = OTHER; note = Phosphorothioate linkage
  modified_base 1..20: mod_base = OTHER; note = 2'-O-(2-methoxyethyl) ribonucleotide
  modified_base 3..5: mod_base = OTHER; note = 5-methyl cytidine
  modified_base 8..10: mod_base = OTHER; note = 5-methyl cytidine
  modified_base 13: mod_base = OTHER; note = 5-methyl cytidine
  modified_base 20: mod_base = OTHER; note = 5-methyl cytidine
tgcccttcccatctggtttc

SEQ ID NO: 75 - RNA, 20 nt, synthetic construct
  source 1..20: mol_type = other RNA
  modified_base 1..20: mod_base = OTHER; note = Phosphorothioate linkage
  modified_base 1..20: mod_base = OTHER; note = 2'-O-(2-methoxyethyl) ribonucleotide
  modified_base 2: mod_base = OTHER; note = 5-methyl cytidine
  modified_base 6: mod_base = OTHER; note = 5-methyl cytidine
  modified_base 10..12: mod_base = OTHER; note = 5-methyl cytidine
  modified_base 15..16: mod_base = OTHER; note = 5-methyl cytidine
  modified_base 20: mod_base = OTHER; note = 5-methyl cytidine
gcattcaatccctgccaagc

SEQ ID NO: 76 - RNA, 20 nt, synthetic construct
  source 1..20: mol_type = other RNA
  modified_base 1..20: mod_base = OTHER; note = Phosphorothioate linkage
  modified_base 1..20: mod_base = OTHER; note = 2'-O-(2-methoxyethyl) ribonucleotide
  modified_base 1..2: mod_base = OTHER; note = 5-methyl cytidine
  modified_base 4: mod_base = OTHER; note = 5-methyl cytidine
  modified_base 8: mod_base = OTHER; note = 5-methyl cytidine
  modified_base 15: mod_base = OTHER; note = 5-methyl cytidine
  modified_base 20: mod_base = OTHER; note = 5-methyl cytidine
ccactggcattgaacatggc

SEQ ID NO: 77 - RNA, 20 nt, synthetic construct
  source 1..20: mol_type = other RNA
  modified_base 1..20: mod_base = OTHER; note = Phosphorothioate linkage
  modified_base 1..20: mod_base = OTHER; note = 2'-O-(2-methoxyethyl) ribonucleotide
  modified_base 2..3: mod_base = OTHER; note = 5-methyl cytidine
  modified_base 5: mod_base = OTHER; note = 5-methyl cytidine
  modified_base 8: mod_base = OTHER; note = 5-methyl cytidine
  modified_base 10: mod_base = OTHER; note = 5-methyl cytidine
  modified_base 14: mod_base = OTHER; note = 5-methyl cytidine
  modified_base 17: mod_base = OTHER; note = 5-methyl cytidine
  modified_base 20: mod_base = OTHER; note = 5-methyl cytidine
gccacttctctttcgacagc

SEQ ID NO: 78 - RNA, 20 nt, synthetic construct
  source 1..20: mol_type = other RNA
  modified_base 1..20: mod_base = OTHER; note = Phosphorothioate linkage
  modified_base 1..20: mod_base = OTHER; note = 2'-O-(2-methoxyethyl) ribonucleotide
  modified_base 2..3: mod_base = OTHER; note = 5-methyl cytidine
  modified_base 7: mod_base = OTHER; note = 5-methyl cytidine
  modified_base 14: mod_base = OTHER; note = 5-methyl cytidine
gccgatctggagactaggaa

SEQ ID NO: 79 - RNA, 20 nt, synthetic construct
  source 1..20: mol_type = other RNA
  modified_base 1..20: mod_base = OTHER; note = Phosphorothioate linkage
  modified_base 1..20: mod_base = OTHER; note = 2'-O-(2-methoxyethyl) ribonucleotide
  modified_base 1..2: mod_base = OTHER; note = 5-methyl cytidine
  modified_base 7: mod_base = OTHER; note = 5-methyl cytidine
  modified_base 12..13: mod_base = OTHER; note = 5-methyl cytidine
  modified_base 15: mod_base = OTHER; note = 5-methyl cytidine
ccatatcaattcctcgaagg

SEQ ID NO: 80 - RNA, 20 nt, synthetic construct
  source 1..20: mol_type = other RNA
  modified_base 1..20: mod_base = OTHER; note = Phosphorothioate linkage
  modified_base 1..20: mod_base = OTHER; note = 2'-O-(2-methoxyethyl) ribonucleotide
  modified_base 2: mod_base = OTHER; note = 5-methyl cytidine
  modified_base 7: mod_base = OTHER; note = 5-methyl cytidine
  modified_base 12: mod_base = OTHER; note = 5-methyl cytidine
  modified_base 20: mod_base = OTHER; note = 5-methyl cytidine
gctaatctgttctgtggtac

SEQ ID NO: 81 - RNA, 20 nt, synthetic construct
  source 1..20: mol_type = other RNA
  modified_base 1..20: mod_base = OTHER; note = Phosphorothioate linkage
  modified_base 1..20: mod_base = OTHER; note = 2'-O-(2-methoxyethyl) ribonucleotide
  modified_base 1: mod_base = OTHER; note = 5-methyl cytidine
  modified_base 3..4: mod_base = OTHER; note = 5-methyl cytidine
  modified_base 8: mod_base = OTHER; note = 5-methyl cytidine
  modified_base 12: mod_base = OTHER; note = 5-methyl cytidine
  modified_base 16: mod_base = OTHER; note = 5-methyl cytidine
  modified_base 18: mod_base = OTHER; note = 5-methyl cytidine
caccaagcaggctgactctt

SEQ ID NO: 82 - RNA, 20 nt, synthetic construct
  source 1..20: mol_type = other RNA
  modified_base 1..20: mod_base = OTHER; note = Phosphorothioate linkage
  modified_base 1..20: mod_base = OTHER; note = 2'-O-(2-methoxyethyl) ribonucleotide
  modified_base 1: mod_base = OTHER; note = 5-methyl cytidine
  modified_base 4: mod_base = OTHER; note = 5-methyl cytidine
  modified_base 7..8: mod_base = OTHER; note = 5-methyl cytidine
  modified_base 11: mod_base = OTHER; note = 5-methyl cytidine
  modified_base 13: mod_base = OTHER; note = 5-methyl cytidine
  modified_base 16..17: mod_base = OTHER; note = 5-methyl cytidine
catcatccatctctgcctgg

SEQ ID NO: 83 - RNA, 20 nt, synthetic construct
  source 1..20: mol_type = other RNA
  modified_base 1..20: mod_base = OTHER; note = Phosphorothioate linkage
  modified_base 1..20: mod_base = OTHER; note = 2'-O-(2-methoxyethyl) ribonucleotide
  modified_base 2: mod_base = OTHER; note = 5-methyl cytidine
  modified_base 4..5: mod_base = OTHER; note = 5-methyl cytidine
  modified_base 7: mod_base = OTHER; note = 5-methyl cytidine
  modified_base 9: mod_base = OTHER; note = 5-methyl cytidine
  modified_base 11..12: mod_base = OTHER; note = 5-methyl cytidine
  modified_base 16..18: mod_base = OTHER; note = 5-methyl cytidine
tctcctctctcctggcccat

SEQ ID NO: 84 - RNA, 20 nt, synthetic construct
  source 1..20: mol_type = other RNA
  modified_base 1..20: mod_base = OTHER; note = Phosphorothioate linkage
  modified_base 1..20: mod_base = OTHER; note = 2'-O-(2-methoxyethyl) ribonucleotide
  modified_base 3: mod_base = OTHER; note = 5-methyl cytidine
  modified_base 5: mod_base = OTHER; note = 5-methyl cytidine
  modified_base 8..9: mod_base = OTHER; note = 5-methyl cytidine
  modified_base 13..14: mod_base = OTHER; note = 5-methyl cytidine
  modified_base 16..17: mod_base = OTHER; note = 5-methyl cytidine
  modified_base 19: mod_base = OTHER; note = 5-methyl cytidine
gacactgccgttcctccacg

SEQ ID NO: 85 - RNA, 20 nt, synthetic construct
  source 1..20: mol_type = other RNA
  modified_base 1..20: mod_base = OTHER; note = Phosphorothioate linkage
  modified_base 1..20: mod_base = OTHER; note = 2'-O-(2-methoxyethyl) ribonucleotide
  modified_base 3: mod_base = OTHER; note = 5-methyl cytidine
  modified_base 6: mod_base = OTHER; note = 5-methyl cytidine
  modified_base 10: mod_base = OTHER; note = 5-methyl cytidine
  modified_base 12..13: mod_base = OTHER; note = 5-methyl cytidine
  modified_base 16..19: mod_base = OTHER; note = 5-methyl cytidine
tgcagcagtctccatcccct

SEQ ID NO: 86 - RNA, 20 nt, synthetic construct
  source 1..20: mol_type = other RNA
  modified_base 1..20: mod_base = OTHER; note = Phosphorothioate linkage
  modified_base 1..20: mod_base = OTHER; note = 2'-O-(2-methoxyethyl) ribonucleotide
  modified_base 2..3: mod_base = OTHER; note = 5-methyl cytidine
  modified_base 8..9: mod_base = OTHER; note = 5-methyl cytidine
  modified_base 13: mod_base = OTHER; note = 5-methyl cytidine
  modified_base 15: mod_base = OTHER; note = 5-methyl cytidine
  modified_base 19: mod_base = OTHER; note = 5-methyl cytidine
tccagttccttgctcaggct

SEQ ID NO: 87 - RNA, 20 nt, synthetic construct
  source 1..20: mol_type = other RNA
  modified_base 1..20: mod_base = OTHER; note = Phosphorothioate linkage
  modified_base 1..20: mod_base = OTHER; note = 2'-O-(2-methoxyethyl) ribonucleotide
  modified_base 8..9: mod_base = OTHER; note = 5-methyl cytidine
  modified_base 12..16: mod_base = OTHER; note = 5-methyl cytidine
  modified_base 19..20: mod_base = OTHER; note = 5-methyl cytidine
tggttagccatccccctgcc

SEQ ID NO: 88 - RNA, 20 nt, synthetic construct
  source 1..20: mol_type = other RNA
  modified_base 1..20: mod_base = OTHER; note = Phosphorothioate linkage
  modified_base 1..20: mod_base = OTHER; note = 2'-O-(2-methoxyethyl) ribonucleotide
  modified_base 1..2: mod_base = OTHER; note = 5-methyl cytidine
  modified_base 5: mod_base = OTHER; note = 5-methyl cytidine
  modified_base 8: mod_base = OTHER; note = 5-methyl cytidine
  modified_base 11: mod_base = OTHER; note = 5-methyl cytidine
  modified_base 14..15: mod_base = OTHER; note = 5-methyl cytidine
  modified_base 17: mod_base = OTHER; note = 5-methyl cytidine
ccgacttctgctgcctcgag

SEQ ID NO: 89 - RNA, 20 nt, synthetic construct
  source 1..20: mol_type = other RNA
  modified_base 1..20: mod_base = OTHER; note = Phosphorothioate linkage
  modified_base 1..20: mod_base = OTHER; note = 2'-O-(2-methoxyethyl) ribonucleotide
  modified_base 1..2: mod_base = OTHER; note = 5-methyl cytidine
  modified_base 5: mod_base = OTHER; note = 5-methyl cytidine
  modified_base 8: mod_base = OTHER; note = 5-methyl cytidine
  modified_base 11: mod_base = OTHER; note = 5-methyl cytidine
  modified_base 14..15: mod_base = OTHER; note = 5-methyl cytidine
  modified_base 17: mod_base = OTHER; note = 5-methyl cytidine
ccctttccctcctccgactt

SEQ ID NO: 90 - RNA, 20 nt, synthetic construct
  source 1..20: mol_type = other RNA
  modified_base 1..20: mod_base = OTHER; note = Phosphorothioate linkage
  modified_base 1..20: mod_base = OTHER; note = 2'-O-(2-methoxyethyl) ribonucleotide
  modified_base 1..3: mod_base = OTHER; note = 5-methyl cytidine
  modified_base 7..9: mod_base = OTHER; note = 5-methyl cytidine
  modified_base 11..12: mod_base = OTHER; note = 5-methyl cytidine
  modified_base 14..15: mod_base = OTHER; note = 5-methyl cytidine
  modified_base 18: mod_base = OTHER; note = 5-methyl cytidine
  modified_base 1..20: mod_base = OTHER; note = 2'-O-(2-methoxyethyl) ribonucleotide
  modified_base 3: mod_base = OTHER; note = 5-methyl cytidine
  modified_base 5: mod_base = OTHER; note = 5-methyl cytidine
  modified_base 12: mod_base = OTHER; note = 5-methyl cytidine
  modified_base 14..16: mod_base = OTHER; note = 5-methyl cytidine
  modified_base 20: mod_base = OTHER; note = 5-methyl cytidine
agctcggttggcaccctttc

SEQ ID NO: 91 - RNA, 20 nt, synthetic construct
  source 1..20: mol_type = other RNA
  modified_base 1..20: mod_base = OTHER; note = Phosphorothioate linkage
  modified_base 1..20: mod_base = OTHER; note = 2'-O-(2-methoxyethyl) ribonucleotide
  modified_base 2..3: mod_base = OTHER; note = 5-methyl cytidine
  modified_base 5: mod_base = OTHER; note = 5-methyl cytidine
  modified_base 7: mod_base = OTHER; note = 5-methyl cytidine
  modified_base 10: mod_base = OTHER; note = 5-methyl cytidine
  modified_base 12..13: mod_base = OTHER; note = 5-methyl cytidine
  modified_base 15: mod_base = OTHER; note = 5-methyl cytidine
  modified_base 18: mod_base = OTHER; note = 5-methyl cytidine
  modified_base 20: mod_base = OTHER; note = 5-methyl cytidine
gccacacgactccacagctc

SEQ ID NO: 92 - RNA, 20 nt, synthetic construct
  source 1..20: mol_type = other RNA
  modified_base 1..20: mod_base = OTHER; note = Phosphorothioate linkage
  modified_base 1..20: mod_base = OTHER; note = 2'-O-(2-methoxyethyl) ribonucleotide
  modified_base 1..2: mod_base = OTHER; note = 5-methyl cytidine
  modified_base 7: mod_base = OTHER; note = 5-methyl cytidine
  modified_base 12..13: mod_base = OTHER; note = 5-methyl cytidine
  modified_base 15: mod_base = OTHER; note = 5-methyl cytidine
  modified_base 12..13: mod_base = OTHER; note = 5-methyl cytidine
  modified_base 15: mod_base = OTHER; note = 5-methyl cytidine
ttagaacccctgccacacga

SEQ ID NO: 93 - RNA, 20 nt, synthetic construct
  source 1..20: mol_type = other RNA
  modified_base 1..20: mod_base = OTHER; note = Phosphorothioate linkage
  modified_base 1..20: mod_base = OTHER; note = 2'-O-(2-methoxyethyl) ribonucleotide
  modified_base 4: mod_base = OTHER; note = 5-methyl cytidine
  modified_base 7: mod_base = OTHER; note = 5-methyl cytidine
  modified_base 9: mod_base = OTHER; note = 5-methyl cytidine
  modified_base 15..16: mod_base = OTHER; note = 5-methyl cytidine
  modified_base 20: mod_base = OTHER; note = 5-methyl cytidine
ggtctgctctagctccaggc

SEQ ID NO: 94 - RNA, 20 nt, synthetic construct
  source 1..20: mol_type = other RNA
  modified_base 1..20: mod_base = OTHER; note = Phosphorothioate linkage
  modified_base 1..20: mod_base = OTHER; note = 2'-O-(2-methoxyethyl) ribonucleotide
  modified_base 5: mod_base = OTHER; note = 5-methyl cytidine
  modified_base 10..11: mod_base = OTHER; note = 5-methyl cytidine
  modified_base 13: mod_base = OTHER; note = 5-methyl cytidine
  modified_base 17: mod_base = OTHER; note = 5-methyl cytidine
gtgtcttatccgctgtctgg

SEQ ID NO: 95 - RNA, 20 nt, synthetic construct
  source 1..20: mol_type = other RNA
  modified_base 1..20: mod_base = OTHER; note = Phosphorothioate linkage
  modified_base 1..20: mod_base = OTHER; note = 2'-O-(2-methoxyethyl) ribonucleotide
  modified_base 2: mod_base = OTHER; note = 5-methyl cytidine
  modified_base 8: mod_base = OTHER; note = 5-methyl cytidine
  modified_base 14..15: mod_base = OTHER; note = 5-methyl cytidine
  modified_base 17: mod_base = OTHER; note = 5-methyl cytidine
  modified_base 20: mod_base = OTHER; note = 5-methyl cytidine
actagtactaggtcctcagc

SEQ ID NO: 96 - RNA, 20 nt, synthetic construct
  source 1..20: mol_type = other RNA
  modified_base 1..20: mod_base = OTHER; note = Phosphorothioate linkage
  modified_base 1..20: mod_base = OTHER; note = 2'-O-(2-methoxyethyl) ribonucleotide
  modified_base 2: mod_base = OTHER; note = 5-methyl cytidine
  modified_base 4: mod_base = OTHER; note = 5-methyl cytidine
  modified_base 11: mod_base = OTHER; note = 5-methyl cytidine
  modified_base 13: mod_base = OTHER; note = 5-methyl cytidine
tctcaagatacacaggaagg

SEQ ID NO: 97 - RNA, 20 nt, synthetic construct
  source 1..20: mol_type = other RNA
  modified_base 1..20: mod_base = OTHER; note = Phosphorothioate linkage
  modified_base 1..20: mod_base = OTHER; note = 2'-O-(2-methoxyethyl) ribonucleotide
  modified_base 6: mod_base = OTHER; note = 5-methyl cytidine
  modified_base 11: mod_base = OTHER; note = 5-methyl cytidine
  modified_base 13..15: mod_base = OTHER; note = 5-methyl cytidine
  modified_base 20: mod_base = OTHER; note = 5-methyl cytidine
ataaactatactccctagtc

SEQ ID NO: 98 - RNA, 20 nt, synthetic construct
  source 1..20: mol_type = other RNA
  modified_base 1..20: mod_base = OTHER; note = Phosphorothioate linkage
  modified_base 1..20: mod_base = OTHER; note = 2'-O-(2-methoxyethyl) ribonucleotide
  modified_base 2..3: mod_base = OTHER; note = 5-methyl cytidine
  modified_base 7: mod_base = OTHER; note = 5-methyl cytidine
  modified_base 12: mod_base = OTHER; note = 5-methyl cytidine
acctaacatttcatgaaagt

SEQ ID NO: 99 - RNA, 20 nt, synthetic construct
  source 1..20: mol_type = other RNA
  modified_base 1..20: mod_base = OTHER; note = Phosphorothioate linkage
  modified_base 1..20: mod_base = OTHER; note = 2'-O-(2-methoxyethyl) ribonucleotide
  modified_base 14: mod_base = OTHER; note = 5-methyl cytidine
  modified_base 19: mod_base = OTHER; note = 5-methyl cytidine
gtaggttattgatcgattca

SEQ ID NO: 100 - RNA, 20 nt, synthetic construct
  source 1..20: mol_type = other RNA
  modified_base 1..20: mod_base = OTHER; note = Phosphorothioate linkage
  modified_base 1..20: mod_base = OTHER; note = 2'-O-(2-methoxyethyl) ribonucleotide
  modified_base 2: mod_base = OTHER; note = 5-methyl cytidine
tctgggtggttgtaattagt

SEQ ID NO: 101 - RNA, 20 nt, synthetic construct
  source 1..20: mol_type = other RNA
  modified_base 1..20: mod_base = OTHER; note = Phosphorothioate linkage
  modified_base 1..20: mod_base = OTHER; note = 2'-O-(2-methoxyethyl) ribonucleotide
  modified_base 1: mod_base = OTHER; note = 5-methyl cytidine
  modified_base 4..5: mod_base = OTHER; note = 5-methyl cytidine
  modified_base 17: mod_base = OTHER; note = 5-methyl cytidine
ctacctgtatttttttctgg

SEQ ID NO: 102 - RNA, 20 nt, synthetic construct
  source 1..20: mol_type = other RNA
  modified_base 1..20: mod_base = OTHER; note = Phosphorothioate linkage
  modified_base 1..20: mod_base = OTHER; note = 2'-O-(2-methoxyethyl) ribonucleotide
  modified_base 14: mod_base = OTHER; note = 5-methyl cytidine
  modified_base 18: mod_base = OTHER; note = 5-methyl cytidine
gtgatatttgtttcagtctg

SEQ ID NO: 103 - RNA, 20 nt, synthetic construct
  source 1..20: mol_type = other RNA
  modified_base 1..20: mod_base = OTHER; note = Phosphorothioate linkage
  modified_base 1..20: mod_base = OTHER; note = 2'-O-(2-methoxyethyl) ribonucleotide
  modified_base 1: mod_base = OTHER; note = 5-methyl cytidine
  modified_base 4: mod_base = OTHER; note = 5-methyl cytidine
  modified_base 10: mod_base = OTHER; note = 5-methyl cytidine
  modified_base 18: mod_base = OTHER; note = 5-methyl cytidine
cggctttgacgattagactt

SEQ ID NO: 104 - RNA, 20 nt, synthetic construct
  source 1..20: mol_type = other RNA
  modified_base 1..20: mod_base = OTHER; note = Phosphorothioate linkage
  modified_base 1..20: mod_base = OTHER; note = 2'-O-(2-methoxyethyl) ribonucleotide
  modified_base 2: mod_base = OTHER; note = 5-methyl cytidine
  modified_base 5: mod_base = OTHER; note = 5-methyl cytidine
  modified_base 7: mod_base = OTHER; note = 5-methyl cytidine
  modified_base 14: mod_base = OTHER; note = 5-methyl cytidine
  modified_base 16: mod_base = OTHER; note = 5-methyl cytidine
  modified_base 19: mod_base = OTHER; note = 5-methyl cytidine
gctgctcaagaatcacggct

SEQ ID NO: 105 - RNA, 20 nt, synthetic construct
  source 1..20: mol_type = other RNA
  modified_base 1..20: mod_base = OTHER; note = Phosphorothioate linkage
  modified_base 1..20: mod_base = OTHER; note = 2'-O-(2-methoxyethyl) ribonucleotide
  modified_base 5..6: mod_base = OTHER; note = 5-methyl cytidine
  modified_base 8: mod_base = OTHER; note = 5-methyl cytidine
  modified_base 11: mod_base = OTHER; note = 5-methyl cytidine
  modified_base 13: mod_base = OTHER; note = 5-methyl cytidine
  modified_base 20: mod_base = OTHER; note = 5-methyl cytidine
attgccgctgctcaagaatc

SEQ ID NO: 106 - RNA, 20 nt, synthetic construct
  source 1..20: mol_type = other RNA
  modified_base 1..20: mod_base = OTHER; note = Phosphorothioate linkage
  modified_base 1..20: mod_base = OTHER; note = 2'-O-(2-methoxyethyl) ribonucleotide
  modified_base 1: mod_base = OTHER; note = 5-methyl cytidine
  modified_base 3..4: mod_base = OTHER; note = 5-methyl cytidine
  modified_base 12..14: mod_base = OTHER; note = 5-methyl cytidine
  modified_base 18..19: mod_base = OTHER; note = 5-methyl cytidine
ctcctaaatgtccctggccg

SEQ ID NO: 107 - RNA, 20 nt, synthetic construct
  source 1..20: mol_type = other RNA
  modified_base 1..20: mod_base = OTHER; note = Phosphorothioate linkage
  modified_base 1..20: mod_base = OTHER; note = 2'-O-(2-methoxyethyl) ribonucleotide
  modified_base 5..7: mod_base = OTHER; note = 5-methyl cytidine
  modified_base 9..10: mod_base = OTHER; note = 5-methyl cytidine
  modified_base 12..14: mod_base = OTHER; note = 5-methyl cytidine
gtgtccctccaccctgagtt

SEQ ID NO: 108 - RNA, 20 nt, synthetic construct
  source 1..20: mol_type = other RNA
  modified_base 1..20: mod_base = OTHER; note = Phosphorothioate linkage
  modified_base 1..20: mod_base = OTHER; note = 2'-O-(2-methoxyethyl) ribonucleotide
  modified_base 7: mod_base = OTHER; note = 5-methyl cytidine
  modified_base 11..13: mod_base = OTHER; note = 5-methyl cytidine
  modified_base 17..18: mod_base = OTHER; note = 5-methyl cytidine
ggattgctggcccttaccta

SEQ ID NO: 109 - RNA, 20 nt, synthetic construct
  source 1..20: mol_type = other RNA
  modified_base 1..20: mod_base = OTHER; note = Phosphorothioate linkage
  modified_base 1..20: mod_base = OTHER; note = 2'-O-(2-methoxyethyl) ribonucleotide
  modified_base 3: mod_base = OTHER; note = 5-methyl cytidine
gtcgtgtgatgtttagtggg

SEQ ID NO: 110 - RNA, 20 nt, synthetic construct
  source 1..20: mol_type = other RNA
  modified_base 1..20: mod_base = OTHER; note = Phosphorothioate linkage
  modified_base 1..20: mod_base = OTHER; note = 2'-O-(2-methoxyethyl) ribonucleotide
  modified_base 8: mod_base = OTHER; note = 5-methyl cytidine
  modified_base 16: mod_base = OTHER; note = 5-methyl cytidine
gattgttctgtgtgtcgtgt

SEQ ID NO: 111 - RNA, 20 nt, synthetic construct
  source 1..20: mol_type = other RNA
  modified_base 1..20: mod_base = OTHER; note = Phosphorothioate linkage
  modified_base 1..20: mod_base = OTHER; note = 2'-O-(2-methoxyethyl) ribonucleotide
  modified_base 20: mod_base = OTHER; note = 5-methyl cytidine
gtgaagtaggttgttgagtc

SEQ ID NO: 112 - RNA, 20 nt, synthetic construct
  source 1..20: mol_type = other RNA
  modified_base 1..20: mod_base = OTHER; note = Phosphorothioate linkage
  modified_base 1..20: mod_base = OTHER; note = 2'-O-(2-methoxyethyl) ribonucleotide
  modified_base 2..3: mod_base = OTHER; note = 5-methyl cytidine
  modified_base 7..9: mod_base = OTHER; note = 5-methyl cytidine
  modified_base 12: mod_base = OTHER; note = 5-methyl cytidine
accttacccttctgatgtta

SEQ ID NO: 113 - RNA, 20 nt, synthetic construct
  source 1..20: mol_type = other RNA
  modified_base 1..20: mod_base = OTHER; note = Phosphorothioate linkage
  modified_base 1..20: mod_base = OTHER; note = 2'-O-(2-methoxyethyl) ribonucleotide
  modified_base 4: mod_base = OTHER; note = 5-methyl cytidine
  modified_base 8..9: mod_base = OTHER; note = 5-methyl cytidine
  modified_base 11: mod_base = OTHER; note = 5-methyl cytidine
  modified_base 17: mod_base = OTHER; note = 5-methyl cytidine
ttacagacctcgttatcgtg

SEQ ID NO: 114 - RNA, 20 nt, synthetic construct
  source 1..20: mol_type = other RNA
  modified_base 1..20: mod_base = OTHER; note = Phosphorothioate linkage
  modified_base 1..20: mod_base = OTHER; note = 2'-O-(2-methoxyethyl) ribonucleotide
  modified_base 17: mod_base = OTHER; note = 5-methyl cytidine
aatttttttgtgttggcggg

SEQ ID NO: 115 - RNA, 20 nt, synthetic construct
  source 1..20: mol_type = other RNA
  modified_base 1..20: mod_base = OTHER; note = Phosphorothioate linkage
  modified_base 1..20: mod_base = OTHER; note = 2'-O-(2-methoxyethyl) ribonucleotide
  modified_base 3: mod_base = OTHER; note = 5-methyl cytidine
  modified_base 6: mod_base = OTHER; note = 5-methyl cytidine
  modified_base 11: mod_base = OTHER; note = 5-methyl cytidine
  modified_base 13: mod_base = OTHER; note = 5-methyl cytidine
  modified_base 15: mod_base = OTHER; note = 5-methyl cytidine
tgctgcataactctcttaag

SEQ ID NO: 116 - RNA, 20 nt, synthetic construct
  source 1..20: mol_type = other RNA
  modified_base 1..20: mod_base = OTHER; note = Phosphorothioate linkage
  modified_base 1..20: mod_base = OTHER; note = 2'-O-(2-methoxyethyl) ribonucleotide
  modified_base 13: mod_base = OTHER; note = 5-methyl cytidine
  modified_base 16: mod_base = OTHER; note = 5-methyl cytidine
attgtaatgatgctgcataa

SEQ ID NO: 117 - RNA, 20 nt, synthetic construct
  source 1..20: mol_type = other RNA
  modified_base 1..20: mod_base = OTHER; note = Phosphorothioate linkage
  modified_base 1..20: mod_base = OTHER; note = 2'-O-(2-methoxyethyl) ribonucleotide
  modified_base 5: mod_base = OTHER; note = 5-methyl cytidine
  modified_base 11: mod_base = OTHER; note = 5-methyl cytidine
tggtcttaaactgattgtaa

SEQ ID NO: 118 - RNA, 20 nt, synthetic construct
  source 1..20: mol_type = other RNA
  modified_base 1..20: mod_base = OTHER; note = Phosphorothioate linkage
  modified_base 1..20: mod_base = OTHER; note = 2'-O-(2-methoxyethyl) ribonucleotide
  modified_base 1: mod_base = OTHER; note = 5-methyl cytidine
  modified_base 9: mod_base = OTHER; note = 5-methyl cytidine
  modified_base 16: mod_base = OTHER; note = 5-methyl cytidine
  modified_base 19..20: mod_base = OTHER; note = 5-methyl cytidine
ctaaaggacataaggctgcc

SEQ ID NO: 119 - RNA, 20 nt, synthetic construct
  source 1..20: mol_type = other RNA
  modified_base 1..20: mod_base = OTHER; note = Phosphorothioate linkage
  modified_base 1..20: mod_base = OTHER; note = 2'-O-(2-methoxyethyl) ribonucleotide
  modified_base 16: mod_base = OTHER; note = 5-methyl cytidine
  modified_base 19: mod_base = OTHER; note = 5-methyl cytidine
ggttagggagggtgactgct

SEQ ID NO: 120 - DNA, 20 bp, synthetic construct
  source 1..20: mol_type = other DNA
  modified_base 1..20: mod_base = OTHER; note = Phosphorothioate linkage
  modified_base 1..5: mod_base = OTHER; note = 2'-O-(2-methoxyethyl) ribonucleotide
  misc_feature 6..15: note = DNA
  modified_base 16..20: mod_base = OTHER; note = 2'-O-(2-methoxyethyl) ribonucleotide
  modified_base 4: mod_base = OTHER; note = 5-methyl cytidine
  modified_base 18: mod_base = OTHER; note = 5-methyl cytidine
ggacttgggagtggtgactg

SEQ ID NO: 121 - DNA, 20 bp, synthetic construct
  source 1..20: mol_type = other DNA
  modified_base 1..20: mod_base = OTHER; note = Phosphorothioate linkage
  modified_base 1..5: mod_base = OTHER; note = 2'-O-(2-methoxyethyl) ribonucleotide
  misc_feature 6..15: note = DNA
  modified_base 16..20: mod_base = OTHER; note = 2'-O-(2-methoxyethyl) ribonucleotide
  modified_base 5: mod_base = OTHER; note = 5-methyl cytidine
  modified_base 16: mod_base = OTHER; note = 5-methyl cytidine
attgcagtgacgccccgtta

SEQ ID NO: 122 - DNA, 20 bp, synthetic construct
  source 1..20: mol_type = other DNA
  modified_base 1..20: mod_base = OTHER; note = Phosphorothioate linkage
  modified_base 1..5: mod_base = OTHER; note = 2'-O-(2-methoxyethyl) ribonucleotide
  misc_feature 6..15: note = DNA
  modified_base 16..20: mod_base = OTHER; note = 2'-O-(2-methoxyethyl) ribonucleotide
  modified_base 19..20: mod_base = OTHER; note = 5-methyl cytidine
ggataggataggagcgagcc

SEQ ID NO: 123 - DNA, 20 bp, synthetic construct
  source 1..20: mol_type = other DNA
  modified_base 1..20: mod_base = OTHER; note = Phosphorothioate linkage
  modified_base 1..5: mod_base = OTHER; note = 2'-O-(2-methoxyethyl) ribonucleotide
  misc_feature 6..15: note = DNA
  modified_base 16..20: mod_base = OTHER; note = 2'-O-(2-methoxyethyl) ribonucleotide
  modified_base 2: mod_base = OTHER; note = 5-methyl cytidine
tctgggtggttgtaattagt

SEQ ID NO: 124 - DNA, 20 bp, synthetic construct
  source 1..20: mol_type = other DNA
  modified_base 1..20: mod_base = OTHER; note = Phosphorothioate linkage
  modified_base 1..5: mod_base = OTHER; note = 2'-O-(2-methoxyethyl) ribonucleotide
  misc_feature 6..8: note = DNA
  modified_base 9: mod_base = OTHER; note = 2'-O-(2-methoxyethyl) ribonucleotide
  misc_feature 10..11: note = DNA
  modified_base 12: mod_base = OTHER; note = 2'-O-(2-methoxyethyl) ribonucleotide
  misc_feature 13..15: note = DNA
  modified_base 16..20: mod_base = OTHER; note = 2'-O-(2-methoxyethyl) ribonucleotide
  modified_base 4: mod_base = OTHER; note = 5-methyl cytidine
  modified_base 18: mod_base = OTHER; note = 5-methyl cytidine
ggacttgggagtggtgactg

SEQ ID NO: 125 - DNA, 20 bp, synthetic construct
  source 1..20: mol_type = other DNA
  modified_base 1..20: mod_base = OTHER; note = Phosphorothioate linkage
  modified_base 1..5: mod_base = OTHER; note = 2'-O-(2-methoxyethyl) ribonucleotide
  misc_feature 6..8: note = DNA
  modified_base 9: mod_base = OTHER; note = 2'-O-(2-methoxyethyl) ribonucleotide
  misc_feature 10..11: note = DNA
  modified_base 12: mod_base = OTHER; note = 2'-O-(2-methoxyethyl) ribonucleotide
  misc_feature 13..15: note = DNA
  modified_base 16..20: mod_base = OTHER; note = 2'-O-(2-methoxyethyl) ribonucleotide
  modified_base 19..20: mod_base = OTHER; note = 5-methyl cytidine
ggataggataggagcgagcc

SEQ ID NO: 126 - DNA, 20 bp, synthetic construct
  source 1..20: mol_type = other DNA
  modified_base 1..20: mod_base = OTHER; note = Phosphorothioate linkage
  modified_base 1..5: mod_base = OTHER; note = 2'-O-(2-methoxyethyl) ribonucleotide
  misc_feature 6..8: note = DNA
  modified_base 9: mod_base = OTHER; note = 2'-O-(2-methoxyethyl) ribonucleotide
  misc_feature 10..11: note = DNA
  modified_base 12: mod_base = OTHER; note = 2'-O-(2-methoxyethyl) ribonucleotide
  misc_feature 13..15: note = DNA
  modified_base 16..20: mod_base = OTHER; note = 2'-O-(2-methoxyethyl) ribonucleotide
  modified_base 2: mod_base = OTHER; note = 5-methyl cytidine
tctgggtggttgtaattagt

SEQ ID NO: 127 - RNA, 20 nt, synthetic construct
  source 1..20: mol_type = other RNA
  modified_base 1..20: mod_base = OTHER; note = Phosphorothioate linkage
  modified_base 1..5: mod_base = OTHER; note = 2'-O-(2-methoxyethyl) ribonucleotide
  modified_base 6: mod_base = OTHER; note = locked nucleic acid
  modified_base 7..8: mod_base = OTHER; note = 2'-O-(2-methoxyethyl) ribonucleotide
  modified_base 9: mod_base = OTHER; note = locked nucleic acid
  modified_base 10..11: mod_base = OTHER; note = 2'-O-(2-methoxyethyl) ribonucleotide
  modified_base 12: mod_base = OTHER; note = locked nucleic acid
  modified_base 13..14: mod_base = OTHER; note = 2'-O-(2-methoxyethyl) ribonucleotide
  modified_base 15: mod_base = OTHER; note = locked nucleic acid
  modified_base 16..20: mod_base = OTHER; note = 2'-O-(2-methoxyethyl) ribonucleotide
  modified_base 4: mod_base = OTHER; note = 5-methyl cytidine
  modified_base 18: mod_base = OTHER; note = 5-methyl cytidine
ggacttgggagtggtgactg

SEQ ID NO: 128 - RNA, 20 nt, synthetic construct
  source 1..20: mol_type = other RNA
  modified_base 1..20: mod_base = OTHER; note = Phosphorothioate linkage
  modified_base 1..5: mod_base = OTHER; note = 2'-O-(2-methoxyethyl) ribonucleotide
  modified_base 6: mod_base = OTHER; note = locked nucleic acid
  modified_base 7..8: mod_base = OTHER; note = 2'-O-(2-methoxyethyl) ribonucleotide
  modified_base 9: mod_base = OTHER; note = locked nucleic acid
  modified_base 10..11: mod_base = OTHER; note = 2'-O-(2-methoxyethyl) ribonucleotide
  modified_base 12: mod_base = OTHER; note = locked nucleic acid
  modified_base 13..14: mod_base = OTHER; note = 2'-O-(2-methoxyethyl) ribonucleotide
  modified_base 15: mod_base = OTHER; note = locked nucleic acid
  modified_base 16..20: mod_base = OTHER; note = 2'-O-(2-methoxyethyl) ribonucleotide
  modified_base 15: mod_base = OTHER; note = 5-methyl cytidine
  modified_base 19..20: mod_base = OTHER; note = 5-methyl cytidine
ggataggataggagcgagcc

SEQ ID NO: 129 - RNA, 20 nt, synthetic construct
  source 1..20: mol_type = other RNA
  modified_base 1..20: mod_base = OTHER; note = Phosphorothioate linkage
  modified_base 1..5: mod_base = OTHER; note = 2'-O-(2-methoxyethyl) ribonucleotide
  modified_base 6: mod_base = OTHER; note = locked nucleic acid
  modified_base 7..8: mod_base = OTHER; note = 2'-O-(2-methoxyethyl) ribonucleotide
  modified_base 9: mod_base = OTHER; note = locked nucleic acid
  modified_base 10..11: mod_base = OTHER; note = 2'-O-(2-methoxyethyl) ribonucleotide
  modified_base 12: mod_base = OTHER; note = locked nucleic acid
  modified_base 13..14: mod_base = OTHER; note = 2'-O-(2-methoxyethyl) ribonucleotide
  modified_base 15: mod_base = OTHER; note = locked nucleic acid
  modified_base 16..20: mod_base = OTHER; note = 2'-O-(2-methoxyethyl) ribonucleotide
  modified_base 2: mod_base = OTHER; note = 5-methyl cytidine
tctgggtggttgtaattagt

SEQ ID NO: 130 - RNA, 22 nt, synthetic construct
  source 1..22: mol_type = other RNA
  modified_base 1..22: mod_base = OTHER; note = Phosphorothioate linkage
  modified_base 1..22: mod_base = OTHER; note = 2'-O-(2-methoxyethyl) ribonucleotide
  modified_base 5: mod_base = OTHER; note = 5-methyl cytidine
  modified_base 19: mod_base = OTHER; note = 5-methyl cytidine
gggacttgggagtggtgactga

SEQ ID NO: 131 - RNA, 24 nt, synthetic construct
  source 1..24: mol_type = other RNA
  modified_base 1..24: mod_base = OTHER; note = Phosphorothioate linkage
  modified_base 1..24: mod_base = OTHER; note = 2'-O-(2-methoxyethyl) ribonucleotide
  modified_base 6: mod_base = OTHER; note = 5-methyl cytidine
  modified_base 20: mod_base = OTHER; note = 5-methyl cytidine
agggacttgggagtggtgactgaa

SEQ ID NO: 132 - RNA, 22 nt, synthetic construct
  source 1..22: mol_type = other RNA
  modified_base 1..22: mod_base = OTHER; note = Phosphorothioate linkage
  modified_base 1..22: mod_base = OTHER; note = 2'-O-(2-methoxyethyl) ribonucleotide
  modified_base 16: mod_base = OTHER; note = 5-methyl cytidine
  modified_base 20..21: mod_base = OTHER; note = 5-methyl cytidine
aggataggataggagcgagcca

SEQ ID NO: 133 - RNA, 24 nt, synthetic construct
  source 1..24: mol_type = other RNA
  modified_base 1..24: mod_base = OTHER; note = Phosphorothioate linkage
  modified_base 1..24: mod_base = OTHER; note = 2'-O-(2-methoxyethyl) ribonucleotide
  modified_base 1: mod_base = OTHER; note = 5-methyl cytidine
  modified_base 17: mod_base = OTHER; note = 5-methyl cytidine
  modified_base 21..22: mod_base = OTHER; note = 5-methyl cytidine
caggataggataggagcgagccag

SEQ ID NO: 134 - RNA, 22 nt, synthetic construct
  source 1..22: mol_type = other RNA
  modified_base 1..22: mod_base = OTHER; note = Phosphorothioate linkage
  modified_base 1..22: mod_base = OTHER; note = 2'-O-(2-methoxyethyl) ribonucleotide
  modified_base 3: mod_base = OTHER; note = 5-methyl cytidine
ttctgggtggttgtaattagta

SEQ ID NO: 135 - RNA, 24 nt, synthetic construct
  source 1..24: mol_type = other RNA
  modified_base 1..24: mod_base = OTHER; note = Phosphorothioate linkage
  modified_base 1..24: mod_base = OTHER; note = 2'-O-(2-methoxyethyl) ribonucleotide
  modified_base 4: mod_base = OTHER; note = 5-methyl cytidine
gttctgggtggttgtaattagtag

SEQ ID NO: 136 - RNA, 20 nt, synthetic construct
  source 1..20: mol_type = other RNA
  modified_base 1..20: mod_base = OTHER; note = Phosphorothioate linkage
  modified_base 1..20: mod_base = OTHER; note = 2'-O-(2-methoxyethyl) ribonucleotide
  modified_base 1: mod_base = OTHER; note = 5-methyl cytidine
  modified_base 15: mod_base = OTHER; note = 5-methyl cytidine
  modified_base 20: mod_base = OTHER; note = 5-methyl cytidine
cttgggagtggtgactgaac

SEQ ID NO: 137 - RNA, 20 nt, synthetic construct
  source 1..20: mol_type = other RNA
  modified_base 1..20: mod_base = OTHER; note = Phosphorothioate linkage
  modified_base 1..20: mod_base = OTHER; note = 2'-O-(2-methoxyethyl) ribonucleotide
  modified_base 2: mod_base = OTHER; note = 5-methyl cytidine
  modified_base 16: mod_base = OTHER; note = 5-methyl cytidine
acttgggagtggtgactgaa

SEQ ID NO: 138 - RNA, 20 nt, synthetic construct
  source 1..20: mol_type = other RNA
  modified_base 1..20: mod_base = OTHER; note = Phosphorothioate linkage
  modified_base 1..20: mod_base = OTHER; note = 2'-O-(2-methoxyethyl) ribonucleotide
  modified_base 3: mod_base = OTHER; note = 5-methyl cytidine
  modified_base 17: mod_base = OTHER; note = 5-methyl cytidine
gacttgggagtggtgactga

SEQ ID NO: 139 - RNA, 20 nt, synthetic construct
  source 1..20: mol_type = other RNA
  modified_base 1..20: mod_base = OTHER; note = Phosphorothioate linkage
  modified_base 1..20: mod_base = OTHER; note = 2'-O-(2-methoxyethyl) ribonucleotide
  modified_base 5: mod_base = OTHER; note = 5-methyl cytidine
  modified_base 19: mod_base = OTHER; note = 5-methyl cytidine
gggacttgggagtggtgact

SEQ ID NO: 140 - RNA, 20 nt, synthetic construct
  source 1..20: mol_type = other RNA
  modified_base 1..20: mod_base = OTHER; note = Phosphorothioate linkage
  modified_base 1..20: mod_base = OTHER; note = 2'-O-(2-methoxyethyl) ribonucleotide
  modified_base 7: mod_base = OTHER; note = 5-methyl cytidine
tagggacttgggagtggtga

SEQ ID NO: 141 - RNA, 20 nt, synthetic construct
  source 1..20: mol_type = other RNA
  modified_base 1..20: mod_base = OTHER; note = Phosphorothioate linkage
  modified_base 1..20: mod_base = OTHER; note = 2'-O-(2-methoxyethyl) ribonucleotide
  modified_base 9: mod_base = OTHER; note = 5-methyl cytidine
agtagggacttgggagtggt

SEQ ID NO: 142 - RNA, 20 nt, synthetic construct
  source 1..20: mol_type = other RNA
  modified_base 1..20: mod_base = OTHER; note = Phosphorothioate linkage
  modified_base 1..20: mod_base = OTHER; note = 2'-O-(2-methoxyethyl) ribonucleotide
  modified_base 11: mod_base = OTHER; note = 5-methyl cytidine
gtagtagggacttgggagtg

SEQ ID NO: 143 - RNA, 20 nt, synthetic construct
  source 1..20: mol_type = other RNA
  modified_base 1..20: mod_base = OTHER; note = Phosphorothioate linkage
  modified_base 1..20: mod_base = OTHER; note = 2'-O-(2-methoxyethyl) ribonucleotide
  modified_base 13: mod_base = OTHER; note = 5-methyl cytidine
aggtagtagggacttgggag

SEQ ID NO: 144 - RNA, 20 nt, synthetic construct
  source 1..20: mol_type = other RNA
  modified_base 1..20: mod_base = OTHER; note = Phosphorothioate linkage
  modified_base 1..20: mod_base = OTHER; note = 2'-O-(2-methoxyethyl) ribonucleotide
  modified_base 12: mod_base = OTHER; note = 5-methyl cytidine
  modified_base 16..17: mod_base = OTHER; note = 5-methyl cytidine
  modified_base 20: mod_base = OTHER; note = 5-methyl cytidine
taggataggagcgagccagc

SEQ ID NO: 145 - RNA, 20 nt, synthetic construct
  source 1..20: mol_type = other RNA
  modified_base 1..20: mod_base = OTHER; note = Phosphorothioate linkage
  modified_base 1..20: mod_base = OTHER; note = 2'-O-(2-methoxyethyl) ribonucleotide
  modified_base 14: mod_base = OTHER; note = 5-methyl cytidine
  modified_base 18..19: mod_base = OTHER; note = 5-methyl cytidine
gataggataggagcgagcca

SEQ ID NO: 146 - RNA, 20 nt, synthetic construct
  source 1..20: mol_type = other RNA
  modified_base 1..20: mod_base = OTHER; note = Phosphorothioate linkage
  modified_base 1..20: mod_base = OTHER; note = 2'-O-(2-methoxyethyl) ribonucleotide
  modified_base 16: mod_base = OTHER; note = 5-methyl cytidine
  modified_base 20: mod_base = OTHER; note = 5-methyl cytidine
aggataggataggagcgagc

SEQ ID NO: 147 - RNA, 20 nt, synthetic construct
  source 1..20: mol_type = other RNA
  modified_base 1..20: mod_base = OTHER; note = Phosphorothioate linkage
  modified_base 1..20: mod_base = OTHER; note = 2'-O-(2-methoxyethyl) ribonucleotide
  modified_base 1: mod_base = OTHER; note = 5-methyl cytidine
  modified_base 17: mod_base = OTHER; note = 5-methyl cytidine
caggataggataggagcgag

SEQ ID NO: 148 - RNA, 20 nt, synthetic construct
  source 1..20: mol_type = other RNA
  modified_base 1..20: mod_base = OTHER; note = Phosphorothioate linkage
  modified_base 1..20: mod_base = OTHER; note = 2'-O-(2-methoxyethyl) ribonucleotide
  modified_base 4: mod_base = OTHER; note = 5-methyl cytidine
  modified_base 20: mod_base = OTHER; note = 5-methyl cytidine
gggcaggataggataggagc

SEQ ID NO: 149 - RNA, 20 nt, synthetic construct
  source 1..20: mol_type = other RNA
  modified_base 1..20: mod_base = OTHER; note = Phosphorothioate linkage
  modified_base 1..20: mod_base = OTHER; note = 2'-O-(2-methoxyethyl) ribonucleotide
  modified_base 1: mod_base = OTHER; note = 5-methyl cytidine
  modified_base 6: mod_base = OTHER; note = 5-methyl cytidine
  modified_base 11: mod_base = OTHER; note = 5-methyl cytidine
caagacagggcaggatagga

SEQ ID NO: 150 - RNA, 20 nt, synthetic construct
  source 1..20: mol_type = other RNA
  modified_base 1..20: mod_base = OTHER; note = Phosphorothioate linkage
  modified_base 1..20: mod_base = OTHER; note = 2'-O-(2-methoxyethyl) ribonucleotide
  modified_base 5: mod_base = OTHER; note = 5-methyl cytidine
  modified_base 15: mod_base = OTHER; note = 5-methyl cytidine
  modified_base 20: mod_base = OTHER; note = 5-methyl cytidine
agggcagaatagggcaggac

SEQ ID NO: 151 - RNA, 20 nt, synthetic construct
  source 1..20: mol_type = other RNA
  modified_base 1..20: mod_base = OTHER; note = Phosphorothioate linkage
  modified_base 1..20: mod_base = OTHER; note = 2'-O-(2-methoxyethyl) ribonucleotide
  modified_base 3..4: mod_base = OTHER; note = 5-methyl cytidine
aaccgagtttggagaatagg

SEQ ID NO: 152 - RNA, 20 nt, synthetic construct
  source 1..20: mol_type = other RNA
  modified_base 1..20: mod_base = OTHER; note = Phosphorothioate linkage
  modified_base 1..20: mod_base = OTHER; note = 2'-O-(2-methoxyethyl) ribonucleotide
gggtggttgtaattagtagg

SEQ ID NO: 153 - RNA, 20 nt, synthetic construct
  source 1..20: mol_type = other RNA
  modified_base 1..20: mod_base = OTHER; note = Phosphorothioate linkage
  modified_base 1..20: mod_base = OTHER; note = 2'-O-(2-methoxyethyl) ribonucleotide
tgggtggttgtaattagtag

SEQ ID NO: 154 - RNA, 20 nt, synthetic construct
  source 1..20: mol_type = other RNA
  modified_base 1..20: mod_base = OTHER; note = Phosphorothioate linkage
  modified_base 1..20: mod_base = OTHER; note = 2'-O-(2-methoxyethyl) ribonucleotide
  modified_base 3: mod_base = OTHER; note = 5-methyl cytidine
ttctgggtggttgtaattag

SEQ ID NO: 155 - RNA, 20 nt, synthetic construct
  source 1..20: mol_type = other RNA
  modified_base 1..20: mod_base = OTHER; note = Phosphorothioate linkage
  modified_base 1..20: mod_base = OTHER; note = 2'-O-(2-methoxyethyl) ribonucleotide
  modified_base 2: mod_base = OTHER; note = 5-methyl cytidine
  modified_base 8: mod_base = OTHER; note = 5-methyl cytidine
tctggttctgggtggttgta

SEQ ID NO: 156 - DNA, 20 bp, synthetic construct
  source 1..20: mol_type = other DNA
  modified_base 1..20: mod_base = OTHER; note = Phosphorothioate linkage
  modified_base 1..5: mod_base = OTHER; note = 2'-O-(2-methoxyethyl) ribonucleotide
  modified_base 4: mod_base = OTHER; note = 5-methyl cytidine
  modified_base 6: mod_base = OTHER; note = locked nucleic acid
  misc_feature 7..8: note = DNA
  modified_base 9: mod_base = OTHER; note = locked nucleic acid
  misc_feature 10..11: note = DNA
  modified_base 12: mod_base = OTHER; note = locked nucleic acid
  misc_feature 13..14: note = DNA
  modified_base 15: mod_base = OTHER; note = locked nucleic acid
  modified_base 16..20: mod_base = OTHER; note = 2'-O-(2-methoxyethyl) ribonucleotide
  modified_base 18: mod_base = OTHER; note = 5-methyl cytidine
ggacttgggagtggtgactg

SEQ ID NO: 157 - RNA, 20 nt, synthetic construct
  source 1..20: mol_type = other RNA
  modified_base 1..20: mod_base = OTHER; note = Phosphorothioate linkage
  modified_base 1..3: mod_base = OTHER; note = 2'-O-(2-methoxyethyl) ribonucleotide
  modified_base 4: mod_base = OTHER; note = locked nucleic acid
  modified_base 5: mod_base = OTHER; note = 2'-O-(2-methoxyethyl) ribonucleotide
  modified_base 6: mod_base = OTHER; note = locked nucleic acid
  modified_base 7: mod_base = OTHER; note = 2'-O-(2-methoxyethyl) ribonucleotide
  modified_base 8: mod_base = OTHER; note = locked nucleic acid
  modified_base 9: mod_base = OTHER; note = 2'-O-(2-methoxyethyl) ribonucleotide
  modified_base 10: mod_base = OTHER; note = locked nucleic acid
  modified_base 11: mod_base = OTHER; note = 2'-O-(2-methoxyethyl) ribonucleotide
  modified_base 12: mod_base = OTHER; note = locked nucleic acid
  modified_base 13: mod_base = OTHER; note = 2'-O-(2-methoxyethyl) ribonucleotide
  modified_base 14: mod_base = OTHER; note = locked nucleic acid
  modified_base 15: mod_base = OTHER; note = 2'-O-(2-methoxyethyl) ribonucleotide
  modified_base 16: mod_base = OTHER; note = locked nucleic acid
  modified_base 17: mod_base = OTHER; note = 2'-O-(2-methoxyethyl) ribonucleotide
  modified_base 18: mod_base = OTHER; note = locked nucleic acid
  modified_base 19..20: mod_base = OTHER; note = 2'-O-(2-methoxyethyl) ribonucleotide
  modified_base 4: mod_base = OTHER; note = 5-methyl cytidine
  modified_base 18: mod_base = OTHER; note = 5-methyl cytidine
ggacttgggagtggtgactg

SEQ ID NO: 158 - RNA, 20 nt, synthetic construct
  source 1..20: mol_type = other RNA
  modified_base 1..20: mod_base = OTHER; note = Phosphorothioate linkage
  modified_base 1..2: mod_base = OTHER; note = 2'-O-(2-methoxyethyl) ribonucleotide
  modified_base 3: mod_base = OTHER; note = locked nucleic acid
  modified_base 4: mod_base = OTHER; note = 2'-O-(2-methoxyethyl) ribonucleotide
  modified_base 5: mod_base = OTHER; note = locked nucleic acid
  modified_base 6: mod_base = OTHER; note = 2'-O-(2-methoxyethyl) ribonucleotide
  modified_base 7: mod_base = OTHER; note = locked nucleic acid
  modified_base 8: mod_base = OTHER; note = 2'-O-(2-methoxyethyl) ribonucleotide
  modified_base 9: mod_base = OTHER; note = locked nucleic acid
  modified_base 10: mod_base = OTHER; note = 2'-O-(2-methoxyethyl) ribonucleotide
  modified_base 11: mod_base = OTHER; note = locked nucleic acid
  modified_base 12: mod_base = OTHER; note = 2'-O-(2-methoxyethyl) ribonucleotide
  modified_base 13: mod_base = OTHER; note = locked nucleic acid
  modified_base 14: mod_base = OTHER; note = 2'-O-(2-methoxyethyl) ribonucleotide
  modified_base 15: mod_base = OTHER; note = locked nucleic acid
  modified_base 16: mod_base = OTHER; note = 2'-O-(2-methoxyethyl) ribonucleotide
  modified_base 17: mod_base = OTHER; note = locked nucleic acid
  modified_base 18..20: mod_base = OTHER; note = 2'-O-(2-methoxyethyl) ribonucleotide
  modified_base 4: mod_base = OTHER; note = 5-methyl cytidine
  modified_base 18: mod_base = OTHER; note = 5-methyl cytidine
ggacttgggagtggtgactg

SEQ ID NO: 159 - RNA, 20 nt, synthetic construct
  source 1..20: mol_type = other RNA
  modified_base 1..20: mod_base = OTHER; note = Phosphorothioate linkage
  modified_base 1..2: mod_base = OTHER; note = 2'-O-(2-methoxyethyl) ribonucleotide
  modified_base 3: mod_base = OTHER; note = locked nucleic acid
  modified_base 4..5: mod_base = OTHER; note = 2'-O-(2-methoxyethyl) ribonucleotide
  modified_base 6: mod_base = OTHER; note = locked nucleic acid
  modified_base 7..8: mod_base = OTHER; note = 2'-O-(2-methoxyethyl) ribonucleotide
  modified_base 9: mod_base = OTHER; note = locked nucleic acid
  modified_base 10..11: mod_base = OTHER; note = 2'-O-(2-methoxyethyl) ribonucleotide
  modified_base 12: mod_base = OTHER; note = locked nucleic acid
  modified_base 13..14: mod_base = OTHER; note = 2'-O-(2-methoxyethyl) ribonucleotide
  modified_base 15: mod_base = OTHER; note = locked nucleic acid
  modified_base 16..17: mod_base = OTHER; note = 2'-O-(2-methoxyethyl) ribonucleotide
  modified_base 18: mod_base = OTHER; note = locked nucleic acid
  modified_base 19..20: mod_base = OTHER; note = 2'-O-(2-methoxyethyl) ribonucleotide
  modified_base 4: mod_base = OTHER; note = 5-methyl cytidine
  modified_base 18: mod_base = OTHER; note = 5-methyl cytidine
ggacttgggagtggtgactg

SEQ ID NO: 160 - RNA, 20 nt, synthetic construct
  source 1..20: mol_type = other RNA
  modified_base 1..20: mod_base = OTHER; note = Phosphorothioate linkage
  modified_base 1..4: mod_base = OTHER; note = 2'-O-(2-methoxyethyl) ribonucleotide
  modified_base 5: mod_base = OTHER; note = locked nucleic acid
  modified_base 6..8: mod_base = OTHER; note = 2'-O-(2-methoxyethyl) ribonucleotide
  modified_base 9: mod_base = OTHER; note = locked nucleic acid
  modified_base 10..12: mod_base = OTHER; note = 2'-O-(2-methoxyethyl) ribonucleotide
  modified_base 13: mod_base = OTHER; note = locked nucleic acid
  modified_base 14..16: mod_base = OTHER; note = 2'-O-(2-methoxyethyl) ribonucleotide
  modified_base 17: mod_base = OTHER; note = locked nucleic acid
  modified_base 18..20: mod_base = OTHER; note = 2'-O-(2-methoxyethyl) ribonucleotide
  modified_base 4: mod_base = OTHER; note = 5-methyl cytidine
  modified_base 18: mod_base = OTHER; note = 5-methyl cytidine
ggacttgggagtggtgactg

SEQ ID NO: 161 - RNA, 20 nt, synthetic construct
  source 1..20: mol_type = other RNA
  modified_base 1..20: mod_base = OTHER; note = Phosphorothioate linkage
  modified_base 1..3: mod_base = OTHER; note = 2'-O-(2-methoxyethyl) ribonucleotide
  modified_base 4: mod_base = OTHER; note = locked nucleic acid
  modified_base 5..7: mod_base = OTHER; note = 2'-O-(2-methoxyethyl) ribonucleotide
  modified_base 8: mod_base = OTHER; note = locked nucleic acid
  modified_base 9..11: mod_base = OTHER; note = 2'-O-(2-methoxyethyl) ribonucleotide
  modified_base 12: mod_base = OTHER; note = locked nucleic acid
  modified_base 13..15: mod_base = OTHER; note = 2'-O-(2-methoxyethyl) ribonucleotide
  modified_base 16: mod_base = OTHER; note = locked nucleic acid
  modified_base 17..20: mod_base = OTHER; note = 2'-O-(2-methoxyethyl) ribonucleotide
  modified_base 4: mod_base = OTHER; note = 5-methyl cytidine
  modified_base 18: mod_base = OTHER; note = 5-methyl cytidine
ggacttgggagtggtgactg

SEQ ID NO: 162 - RNA, 20 nt, synthetic construct
  source 1..20: mol_type = other RNA
  modified_base 1..20: mod_base = OTHER; note = Phosphorothioate linkage
  modified_base 1..5: mod_base = OTHER; note = 2'-O-(2-methoxyethyl) ribonucleotide
  modified_base 6: mod_base = OTHER; note = locked nucleic acid
  modified_base 7..10: mod_base = OTHER; note = 2'-O-(2-methoxyethyl) ribonucleotide
  modified_base 11: mod_base = OTHER; note = locked nucleic acid
  modified_base 12..15: mod_base = OTHER; note = 2'-O-(2-methoxyethyl) ribonucleotide
  modified_base 16: mod_base = OTHER; note = locked nucleic acid
  modified_base 17..20: mod_base = OTHER; note = 2'-O-(2-methoxyethyl) ribonucleotide
  modified_base 4: mod_base = OTHER; note = 5-methyl cytidine
  modified_base 18: mod_base = OTHER; note = 5-methyl cytidine
ggacttgggagtggtgactg

SEQ ID NO: 163 - RNA, 20 nt, synthetic construct
  source 1..20: mol_type = other RNA
  modified_base 1..20: mod_base = OTHER; note = Phosphorothioate linkage
  modified_base 1..4: mod_base = OTHER; note = 2'-O-(2-methoxyethyl) ribonucleotide
  modified_base 5: mod_base = OTHER; note = locked nucleic acid
  modified_base 6..9: mod_base = OTHER; note = 2'-O-(2-methoxyethyl) ribonucleotide
  modified_base 10: mod_base = OTHER; note = locked nucleic acid
  modified_base 11..14: mod_base = OTHER; note = 2'-O-(2-methoxyethyl) ribonucleotide
  modified_base 15: mod_base = OTHER; note = locked nucleic acid
  modified_base 16..20: mod_base = OTHER; note = 2'-O-(2-methoxyethyl) ribonucleotide
  modified_base 4: mod_base = OTHER; note = 5-methyl cytidine
  modified_base 18: mod_base = OTHER; note = 5-methyl cytidine
ggacttgggagtggtgactg

SEQ ID NO: 164 - DNA, 20 bp, synthetic construct
  source 1..20: mol_type = other DNA
  modified_base 1..20: mod_base = OTHER; note = Phosphorothioate linkage
  modified_base 1..5: mod_base = OTHER; note = 2'-O-(2-methoxyethyl) ribonucleotide
  misc_feature 6..15: note = DNA
  modified_base 16..20: mod_base = OTHER; note = 2'-O-(2-methoxyethyl) ribonucleotide
  modified_base 3: mod_base = OTHER; note = 5-methyl cytidine
  modified_base 17: mod_base = OTHER; note = 5-methyl cytidine
gacttgggagtggtgactga

SEQ ID NO: 165 - DNA, 20 bp, synthetic construct
  source 1..20: mol_type = other DNA
  modified_base 1..20: mod_base = OTHER; note = Phosphorothioate linkage
  modified_base 1..5: mod_base = OTHER; note = 2'-O-(2-methoxyethyl) ribonucleotide
  misc_feature 6..8: note = DNA
  modified_base 9: mod_base = OTHER; note = 2'-O-(2-methoxyethyl) ribonucleotide
  misc_feature 10..11: note = DNA
  modified_base 12: mod_base = OTHER; note = 2'-O-(2-methoxyethyl) ribonucleotide
  misc_feature 13..15: note = DNA
  modified_base 16..20: mod_base = OTHER; note = 2'-O-(2-methoxyethyl) ribonucleotide
  modified_base 3: mod_base = OTHER; note = 5-methyl cytidine
  modified_base 17: mod_base = OTHER; note = 5-methyl cytidine
gacttgggagtggtgactga

SEQ ID NO: 166 - RNA, 21 nt, synthetic construct
  source 1..21: mol_type = other RNA
  modified_base 1..21: mod_base = OTHER; note = Phosphorothioate linkage
  modified_base 1..21: mod_base = OTHER; note = 2'-O-(2-methoxyethyl) ribonucleotide
  modified_base 4: mod_base = OTHER; note = 5-methyl cytidine
  modified_base 18: mod_base = OTHER; note = 5-methyl cytidine
ggacttgggagtggtgactga

SEQ ID NO: 167 - RNA, 23 nt, synthetic construct
  source 1..23: mol_type = other RNA
  modified_base 1..23: mod_base = OTHER; note = Phosphorothioate linkage
  modified_base 1..23: mod_base = OTHER; note = Phosphorothioate linkage
  modified_base 1..23: mod_base = OTHER; note = 2'-O-(2-methoxyethyl) ribonucleotide
  modified_base 4: mod_base = OTHER; note = 5-methyl cytidine
  modified_base 18: mod_base = OTHER; note = 5-methyl cytidine
  modified_base 23: mod_base = OTHER; note = 5-methyl cytidine
ggacttgggagtggtgactgaac

SEQ ID NO: 168 - RNA, 20 nt, synthetic construct
  source 1..20: mol_type = other RNA
  modified_base 1..3: mod_base = OTHER; note = Phosphorothioate linkage
  modified_base 5..16: mod_base = OTHER; note = Phosphorothioate linkage
  modified_base 18..20: mod_base = OTHER; note = Phosphorothioate linkage
  modified_base 1..20: mod_base = OTHER; note = 2'-O-(2-methoxyethyl) ribonucleotide
  modified_base 4: mod_base = OTHER; note = 5-methyl cytidine
  modified_base 18: mod_base = OTHER; note = 5-methyl cytidine
  modified_base 3..4: mod_base = OTHER; note = Phosphorothioate linkage
  modified_base 16..17: mod_base = OTHER; note = Phosphorothioate linkage
ggacttgggagtggtgactg

SEQ ID NO: 169 - RNA, 20 nt, synthetic construct
  source 1..20: mol_type = other RNA
  modified_base 1..3: mod_base = OTHER; note = Phosphorothioate linkage
  modified_base 7..14: mod_base = OTHER; note = Phosphorothioate linkage
  modified_base 18..20: mod_base = OTHER; note = Phosphorothioate linkage
  modified_base 1..20: mod_base = OTHER; note = 2'-O-(2-methoxyethyl) ribonucleotide
  modified_base 4: mod_base = OTHER; note = 5-methyl cytidine
  modified_base 18: mod_base = OTHER; note = 5-methyl cytidine
  modified_base 3..6: mod_base = OTHER; note = Phosphorothioate linkage
  modified_base 14..17: mod_base = OTHER; note = Phosphorothioate linkage
ggacttgggagtggtgactg

SEQ ID NO: 170 - RNA, 20 nt, synthetic construct
  source 1..20: mol_type = other RNA
  modified_base 1..3: mod_base = OTHER; note = Phosphorothioate linkage
  modified_base 19..20: mod_base = OTHER; note = Phosphorothioate linkage
  modified_base 1..20: mod_base = OTHER; note = 2'-O-(2-methoxyethyl) ribonucleotide
  modified_base 4: mod_base = OTHER; note = 5-methyl cytidine
  modified_base 18: mod_base = OTHER; note = 5-methyl cytidine
  modified_base 3..17: mod_base = OTHER; note = Phosphorothioate linkage
ggacttgggagtggtgactg

SEQ ID NO: 171 - RNA, 20 nt, synthetic construct
  source 1..20: mol_type = other RNA
  modified_base 1..3: mod_base = OTHER; note = Phosphorothioate linkage
  modified_base 5..16: mod_base = OTHER; note = Phosphorothioate linkage
  modified_base 19..20: mod_base = OTHER; note = Phosphorothioate linkage
  modified_base 1..20: mod_base = OTHER; note = 2'-O-(2-methoxyethyl) ribonucleotide
  modified_base 5: mod_base = OTHER; note = 5-methyl cytidine
  modified_base 11: mod_base = OTHER; note = 5-methyl cytidine
  modified_base 13..16: mod_base = OTHER; note = 5-methyl cytidine
  modified_base 3..4: mod_base = OTHER; note = Phosphorothioate linkage
  modified_base 16..17: mod_base = OTHER; note = Phosphorothioate linkage
attgcagtgacgccccgtta

SEQ ID NO: 172 - RNA, 20 nt, synthetic construct
  source 1..20: mol_type = other RNA
  modified_base 1..3: mod_base = OTHER; note = Phosphorothioate linkage
  modified_base 8..14: mod_base = OTHER; note = Phosphorothioate linkage
  modified_base 18..20: mod_base = OTHER; note = Phosphorothioate linkage
  modified_base 1..20: mod_base = OTHER; note = 2'-O-(2-methoxyethyl) ribonucleotide
  modified_base 5: mod_base = OTHER; note = 5-methyl cytidine
  modified_base 11: mod_base = OTHER; note = 5-methyl cytidine
  modified_base 13..16: mod_base = OTHER; note = 5-methyl cytidine
  modified_base 3..6: mod_base = OTHER; note = Phosphorothioate linkage
  modified_base 14..17: mod_base = OTHER; note = Phosphorothioate linkage
attgcagtgacgccccgtta

SEQ ID NO: 173 - RNA, 20 nt, synthetic construct
  source 1..20: mol_type = other RNA
  modified_base 1..3: mod_base = OTHER; note = Phosphorothioate linkage
  modified_base 18..20: mod_base = OTHER; note = Phosphorothioate linkage
  modified_base 1..20: mod_base = OTHER; note = 2'-O-(2-methoxyethyl) ribonucleotide
  modified_base 5: mod_base = OTHER; note = 5-methyl cytidine
  modified_base 11: mod_base = OTHER; note = 5-methyl cytidine
  modified_base 13..16: mod_base = OTHER; note = 5-methyl cytidine
attgcagtgacgccccgtta

SEQ ID NO: 174 - RNA, 20 nt, synthetic construct
  source 1..20: mol_type = other RNA
  modified_base 1..3: mod_base = OTHER; note = Phosphorothioate linkage
  modified_base 17..20: mod_base = OTHER; note = Phosphorothioate linkage
  modified_base 1..20: mod_base = OTHER; note = 2'-O-(2-methoxyethyl) ribonucleotide
  modified_base 4: mod_base = OTHER; note = 5-methyl cytidine
  modified_base 18: mod_base = OTHER; note = 5-methyl cytidine
  modified_base 3..16: mod_base = OTHER; note = Phosphorothioate linkage
ggacttgggagtggtgactg

SEQ ID NO: 175 - RNA, 20 nt, synthetic construct
  source 1..20: mol_type = other RNA
  modified_base 1..5: mod_base = OTHER; note = Phosphorothioate linkage
  modified_base 17..20: mod_base = OTHER; note = Phosphorothioate linkage
  modified_base 1..20: mod_base = OTHER; note = 2'-O-(2-methoxyethyl) ribonucleotide
  modified_base 4: mod_base = OTHER; note = 5-methyl cytidine
  modified_base 18: mod_base = OTHER; note = 5-methyl cytidine
  modified_base 5..16: mod_base = OTHER; note = Phosphorothioate linkage
ggacttgggagtggtgactg

SEQ ID NO: 176 - RNA, 20 nt, synthetic construct
  source 1..20: mol_type = other RNA
  modified_base 1..7: mod_base = OTHER; note = Phosphorothioate linkage
  modified_base 17..20: mod_base = OTHER; note = Phosphorothioate linkage
  modified_base 1..20: mod_base = OTHER; note = 2'-O-(2-methoxyethyl) ribonucleotide
  modified_base 4: mod_base = OTHER; note = 5-methyl cytidine
  modified_base 18: mod_base = OTHER; note = 5-methyl cytidine
  modified_base 7..16: mod_base = OTHER; note = Phosphorothioate linkage
ggacttgggagtggtgactg

SEQ ID NO: 177 - RNA, 20 nt, synthetic construct
  source 1..20: mol_type = other RNA
  modified_base 1..9: mod_base = OTHER; note = Phosphorothioate linkage
  modified_base 17..20: mod_base = OTHER; note = Phosphorothioate linkage
  modified_base 1..20: mod_base = OTHER; note = 2'-O-(2-methoxyethyl) ribonucleotide
  modified_base 4: mod_base = OTHER; note = 5-methyl cytidine
  modified_base 18: mod_base = OTHER; note = 5-methyl cytidine
  modified_base 9..16: mod_base = OTHER; note = Phosphorothioate linkage
ggacttgggagtggtgactg

SEQ ID NO: 178 - RNA, 20 nt, synthetic construct
  source 1..20: mol_type = other RNA
  modified_base 1..11: mod_base = OTHER; note = Phosphorothioate linkage
  modified_base 17..20: mod_base = OTHER; note = Phosphorothioate linkage
  modified_base 1..20: mod_base = OTHER; note = 2'-O-(2-methoxyethyl) ribonucleotide
  modified_base 4: mod_base = OTHER; note = 5-methyl cytidine
  modified_base 18: mod_base = OTHER; note = 5-methyl cytidine
  modified_base 11..16: mod_base = OTHER; note = Phosphorothioate linkage
ggacttgggagtggtgactg

SEQ ID NO: 179 - RNA, 20 nt, synthetic construct
  source 1..20: mol_type = other RNA
  modified_base 1..13: mod_base = OTHER; note = Phosphorothioate linkage
  modified_base 17..20: mod_base = OTHER; note = Phosphorothioate linkage
  modified_base 1..20: mod_base = OTHER; note = 2'-O-(2-methoxyethyl) ribonucleotide
  modified_base 4: mod_base = OTHER; note = 5-methyl cytidine
  modified_base 18: mod_base = OTHER; note = 5-methyl cytidine
  modified_base 13..16: mod_base = OTHER; note = Phosphorothioate linkage
ggacttgggagtggtgactg

SEQ ID NO: 180 - RNA, 20 nt, synthetic construct
  source 1..20: mol_type = other RNA
  modified_base 1..3: mod_base = OTHER; note = Phosphorothioate linkage
  modified_base 16..20: mod_base = OTHER; note = Phosphorothioate linkage
  modified_base 1..20: mod_base = OTHER; note = 2'-O-(2-methoxyethyl) ribonucleotide
  modified_base 4: mod_base = OTHER; note = 5-methyl cytidine
  modified_base 18: mod_base = OTHER; note = 5-methyl cytidine
  modified_base 3..15: mod_base = OTHER; note = Phosphorothioate linkage
ggacttgggagtggtgactg

SEQ ID NO: 181 - RNA, 20 nt, synthetic construct
  source 1..20: mol_type = other RNA
  modified_base 1..3: mod_base = OTHER; note = Phosphorothioate linkage
  modified_base 14..20: mod_base = OTHER; note = Phosphorothioate linkage
  modified_base 1..20: mod_base = OTHER; note = 2'-O-(2-methoxyethyl) ribonucleotide
  modified_base 4: mod_base = OTHER; note = 5-methyl cytidine
  modified_base 18: mod_base = OTHER; note = 5-methyl cytidine
  modified_base 3..13: mod_base = OTHER; note = Phosphorothioate linkage
ggacttgggagtggtgactg

SEQ ID NO: 182 - RNA, 20 nt, synthetic construct
  source 1..20: mol_type = other RNA
  modified_base 1..3: mod_base = OTHER; note = Phosphorothioate linkage
  modified_base 12..20: mod_base = OTHER; note = Phosphorothioate linkage
  modified_base 1..20: mod_base = OTHER; note = 2'-O-(2-methoxyethyl) ribonucleotide
  modified_base 4: mod_base = OTHER; note = 5-methyl cytidine
  modified_base 18: mod_base = OTHER; note = 5-methyl cytidine
  modified_base 3..11: mod_base = OTHER; note = Phosphorothioate linkage
ggacttgggagtggtgactg

SEQ ID NO: 183 - RNA, 20 nt, synthetic construct
  source 1..20: mol_type = other RNA
  modified_base 1..3: mod_base = OTHER; note = Phosphorothioate linkage
  modified_base 10..20: mod_base = OTHER; note = Phosphorothioate linkage
  modified_base 1..20: mod_base = OTHER; note = 2'-O-(2-methoxyethyl) ribonucleotide
  modified_base 4: mod_base = OTHER; note = 5-methyl cytidine
  modified_base 18: mod_base = OTHER; note = 5-methyl cytidine
  modified_base 3..16: mod_base = OTHER; note = Phosphorothioate linkage
ggacttgggagtggtgactg

SEQ ID NO: 184 - RNA, 20 nt, synthetic construct
  source 1..20: mol_type = other RNA
  modified_base 1..3: mod_base = OTHER; note = Phosphorothioate linkage
  modified_base 8..20: mod_base = OTHER; note = Phosphorothioate linkage
  modified_base 1..20: mod_base = OTHER; note = 2'-O-(2-methoxyethyl) ribonucleotide
  modified_base 4: mod_base = OTHER; note = 5-methyl cytidine
  modified_base 18: mod_base = OTHER; note = 5-methyl cytidine
  modified_base 3..7: mod_base = OTHER; note = Phosphorothioate linkage
ggacttgggagtggtgactg

SEQ ID NO: 185 - RNA, 20 nt, synthetic construct
  source 1..20: mol_type = other RNA
  modified_base 1..20: mod_base = OTHER; note = Phosphorothioate linkage
  modified_base 1..2: mod_base = OTHER; note = locked nucleic acid
  modified_base 3: mod_base = OTHER; note = 2'-O-(2-methoxyethyl) ribonucleotide
  modified_base 4..5: mod_base = OTHER; note = locked nucleic acid
  modified_base 6: mod_base = OTHER; note = 2'-O-(2-methoxyethyl) ribonucleotide
  modified_base 7: mod_base = OTHER; note = locked nucleic acid
  modified_base 8: mod_base = OTHER; note = 2'-O-(2-methoxyethyl) ribonucleotide
  modified_base 9: mod_base = OTHER; note = locked nucleic acid
  modified_base 10: mod_base = OTHER; note = 2'-O-(2-methoxyethyl) ribonucleotide
  modified_base 11: mod_base = OTHER; note = locked nucleic acid
  modified_base 12: mod_base = OTHER; note = 2'-O-(2-methoxyethyl) ribonucleotide
  modified_base 13: mod_base = OTHER; note = locked nucleic acid
  modified_base 14: mod_base = OTHER; note = 2'-O-(2-methoxyethyl) ribonucleotide
  modified_base 15: mod_base = OTHER; note = locked nucleic acid
  modified_base 16: mod_base = OTHER; note = 2'-O-(2-methoxyethyl) ribonucleotide
  modified_base 17: mod_base = OTHER; note = locked nucleic acid
  modified_base 18: mod_base = OTHER; note = 2'-O-(2-methoxyethyl) ribonucleotide
  modified_base 19..20: mod_base = OTHER; note = locked nucleic acid
  modified_base 4: mod_base = OTHER; note = 5-methyl cytidine
  modified_base 18: mod_base = OTHER; note = 5-methyl cytidine
ggacttgggagtggtgactg

SEQ ID NO: 186 - RNA, 20 nt, synthetic construct
  source 1..20: mol_type = other RNA
  modified_base 1..20: mod_base = OTHER; note = Phosphorothioate linkage
  modified_base 1..2: mod_base = OTHER; note = locked nucleic acid
  modified_base 3: mod_base = OTHER; note = 2'-O-(2-methoxyethyl) ribonucleotide
  modified_base 4: mod_base = OTHER; note = locked nucleic acid
  modified_base 5: mod_base = OTHER; note = 2'-O-(2-methoxyethyl) ribonucleotide
  modified_base 6: mod_base = OTHER; note = locked nucleic acid
  modified_base 7: mod_base = OTHER; note = 2'-O-(2-methoxyethyl) ribonucleotide
  modified_base 8: mod_base = OTHER; note = locked nucleic acid
  modified_base 9: mod_base = OTHER; note = 2'-O-(2-methoxyethyl) ribonucleotide
  modified_base 10: mod_base = OTHER; note = locked nucleic acid
  modified_base 11: mod_base = OTHER; note = 2'-O-(2-methoxyethyl) ribonucleotide
  modified_base 12: mod_base = OTHER; note = locked nucleic acid
  modified_base 13: mod_base = OTHER; note = 2'-O-(2-methoxyethyl) ribonucleotide
  modified_base 14: mod_base = OTHER; note = locked nucleic acid
  modified_base 15: mod_base = OTHER; note = 2'-O-(2-methoxyethyl) ribonucleotide
  modified_base 16..17: mod_base = OTHER; note = locked nucleic acid
  modified_base 18: mod_base = OTHER; note = 2'-O-(2-methoxyethyl) ribonucleotide
  modified_base 19..20: mod_base = OTHER; note = locked nucleic acid
  modified_base 4: mod_base = OTHER; note = 5-methyl cytidine
  modified_base 18: mod_base = OTHER; note = 5-methyl cytidine
ggacttgggagtggtgactg

SEQ ID NO: 187 - RNA, 20 nt, synthetic construct
  source 1..20: mol_type = other RNA
  modified_base 1..3: mod_base = OTHER; note = Phosphorothioate linkage
  modified_base 17..20: mod_base = OTHER; note = Phosphorothioate linkage
  modified_base 1..20: mod_base = OTHER; note = 2'-O-(2-methoxyethyl) ribonucleotide
  modified_base 15: mod_base = OTHER; note = 5-methyl cytidine
  modified_base 19..20: mod_base = OTHER; note = 5-methyl cytidine
  modified_base 3..16: mod_base = OTHER; note = Phosphorothioate linkage
ggataggataggagcgagcc

SEQ ID NO: 188 - RNA, 20 nt, synthetic construct
  source 1..20: mol_type = other RNA
  modified_base 1..5: mod_base = OTHER; note = Phosphorothioate linkage
  modified_base 17..20: mod_base = OTHER; note = Phosphorothioate linkage
  modified_base 1..20: mod_base = OTHER; note = 2'-O-(2-methoxyethyl) ribonucleotide
  modified_base 15: mod_base = OTHER; note = 5-methyl cytidine
  modified_base 19..20: mod_base = OTHER; note = 5-methyl cytidine
  modified_base 5..16: mod_base = OTHER; note = Phosphorothioate linkage
ggataggataggagcgagcc

SEQ ID NO: 189 - RNA, 20 nt, synthetic construct
  source 1..20: mol_type = other RNA
  modified_base 1..7: mod_base = OTHER; note = Phosphorothioate linkage
  modified_base 17..20: mod_base = OTHER; note = Phosphorothioate linkage
  modified_base 1..20: mod_base = OTHER; note = 2'-O-(2-methoxyethyl) ribonucleotide
  modified_base 15: mod_base = OTHER; note = 5-methyl cytidine
  modified_base 19..20: mod_base = OTHER; note = 5-methyl cytidine
  modified_base 7..16: mod_base = OTHER; note = Phosphorothioate linkage
ggataggataggagcgagcc

SEQ ID NO: 190 - RNA, 20 nt, synthetic construct
  source 1..20: mol_type = other RNA
  modified_base 1..9: mod_base = OTHER; note = Phosphorothioate linkage
  modified_base 17..20: mod_base = OTHER; note = Phosphorothioate linkage
  modified_base 1..20: mod_base = OTHER; note = 2'-O-(2-methoxyethyl) ribonucleotide
  modified_base 15: mod_base = OTHER; note = 5-methyl cytidine
  modified_base 19..20: mod_base = OTHER; note = 5-methyl cytidine
  modified_base 9..16: mod_base = OTHER; note = Phosphorothioate linkage
ggataggataggagcgagcc

SEQ ID NO: 191 - RNA, 20 nt, synthetic construct
  source 1..20: mol_type = other RNA
  modified_base 1..11: mod_base = OTHER; note = Phosphorothioate linkage
  modified_base 17..20: mod_base = OTHER; note = Phosphorothioate linkage
  modified_base 1..20: mod_base = OTHER; note = 2'-O-(2-methoxyethyl) ribonucleotide
  modified_base 15: mod_base = OTHER; note = 5-methyl cytidine
  modified_base 19..20: mod_base = OTHER; note = 5-methyl cytidine
  modified_base 11..16: mod_base = OTHER; note = Phosphorothioate linkage
ggataggataggagcgagcc

SEQ ID NO: 192 - RNA, 20 nt, synthetic construct
  source 1..20: mol_type = other RNA
  modified_base 1..13: mod_base = OTHER; note = Phosphorothioate linkage
  modified_base 17..20: mod_base = OTHER; note = Phosphorothioate linkage
  modified_base 1..20: mod_base = OTHER; note = 2'-O-(2-methoxyethyl) ribonucleotide
  modified_base 15: mod_base = OTHER; note = 5-methyl cytidine
  modified_base 19..20: mod_base = OTHER; note = 5-methyl cytidine
  modified_base 13..16: mod_base = OTHER; note = Phosphorothioate linkage
ggataggataggagcgagcc

SEQ ID NO: 193 - RNA, 20 nt, synthetic construct
  source 1..20: mol_type = other RNA
  modified_base 1..3: mod_base = OTHER; note = Phosphorothioate linkage
  modified_base 16..20: mod_base = OTHER; note = Phosphorothioate linkage
  modified_base 1..20: mod_base = OTHER; note = 2'-O-(2-methoxyethyl) ribonucleotide
  modified_base 15: mod_base = OTHER; note = 5-methyl cytidine
  modified_base 19..20: mod_base = OTHER; note = 5-methyl cytidine
  modified_base 3..15: mod_base = OTHER; note = Phosphorothioate linkage
ggataggataggagcgagcc

SEQ ID NO: 194 - RNA, 20 nt, synthetic construct
  source 1..20: mol_type = other RNA
  modified_base 1..3: mod_base = OTHER; note = Phosphorothioate linkage
  modified_base 14..20: mod_base = OTHER; note = Phosphorothioate linkage
  modified_base 1..20: mod_base = OTHER; note = 2'-O-(2-methoxyethyl) ribonucleotide
  modified_base 15: mod_base = OTHER; note = 5-methyl cytidine
  modified_base 19..20: mod_base = OTHER; note = 5-methyl cytidine
  modified_base 3..13: mod_base = OTHER; note = Phosphorothioate linkage
ggataggataggagcgagcc

SEQ ID NO: 195 - RNA, 20 nt, synthetic construct
  source 1..20: mol_type = other RNA
  modified_base 1..3: mod_base = OTHER; note = Phosphorothioate linkage
  modified_base 12..20: mod_base = OTHER; note = Phosphorothioate linkage
  modified_base 1..20: mod_base = OTHER; note = 2'-O-(2-methoxyethyl) ribonucleotide
  modified_base 15: mod_base = OTHER; note = 5-methyl cytidine
  modified_base 19..20: mod_base = OTHER; note = 5-methyl cytidine
  modified_base 3..11: mod_base = OTHER; note = Phosphorothioate linkage
ggataggataggagcgagcc

SEQ ID NO: 196 - RNA, 20 nt, synthetic construct
  source 1..20: mol_type = other RNA
  modified_base 1..3: mod_base = OTHER; note = Phosphorothioate linkage
  modified_base 11..20: mod_base = OTHER; note = Phosphorothioate linkage
  modified_base 1..20: mod_base = OTHER; note = 2'-O-(2-methoxyethyl) ribonucleotide
  modified_base 15: mod_base = OTHER; note = 5-methyl cytidine
  modified_base 19..20: mod_base = OTHER; note = 5-methyl cytidine
  modified_base 3..9: mod_base = OTHER; note = Phosphorothioate linkage
ggataggataggagcgagcc

SEQ ID NO: 197 - RNA, 20 nt, synthetic construct
  source 1..20: mol_type = other RNA
  modified_base 1..3: mod_base = OTHER; note = Phosphorothioate linkage
  modified_base 8..20: mod_base = OTHER; note = Phosphorothioate linkage
  modified_base 1..20: mod_base = OTHER; note = 2'-O-(2-methoxyethyl) ribonucleotide
  modified_base 15: mod_base = OTHER; note = 5-methyl cytidine
  modified_base 19..20: mod_base = OTHER; note = 5-methyl cytidine
  modified_base 3..7: mod_base = OTHER; note = Phosphorothioate linkage
ggataggataggagcgagcc

SEQ ID NO: 198 - RNA, 20 nt, synthetic construct
  source 1..20: mol_type = other RNA
  modified_base 1..20: mod_base = OTHER; note = Phosphorothioate linkage
  modified_base 1..2: mod_base = OTHER; note = locked nucleic acid
  modified_base 3: mod_base = OTHER; note = 2'-O-(2-methoxyethyl) ribonucleotide
  modified_base 4..5: mod_base = OTHER; note = locked nucleic acid
  modified_base 6: mod_base = OTHER; note = 2'-O-(2-methoxyethyl) ribonucleotide
  modified_base 7: mod_base = OTHER; note = locked nucleic acid
  modified_base 8: mod_base = OTHER; note = 2'-O-(2-methoxyethyl) ribonucleotide
  modified_base 9: mod_base = OTHER; note = locked nucleic acid
  modified_base 10: mod_base = OTHER; note = 2'-O-(2-methoxyethyl) ribonucleotide
  modified_base 11: mod_base = OTHER; note = locked nucleic acid
  modified_base 12: mod_base = OTHER; note = 2'-O-(2-methoxyethyl) ribonucleotide
  modified_base 13: mod_base = OTHER; note = locked nucleic acid
  modified_base 14: mod_base = OTHER; note = 2'-O-(2-methoxyethyl) ribonucleotide
  modified_base 15: mod_base = OTHER; note = locked nucleic acid
  modified_base 16: mod_base = OTHER; note = 2'-O-(2-methoxyethyl) ribonucleotide
  modified_base 17: mod_base = OTHER; note = locked nucleic acid
  modified_base 18: mod_base = OTHER; note = 2'-O-(2-methoxyethyl) ribonucleotide
  modified_base 19..20: mod_base = OTHER; note = locked nucleic acid
  modified_base 15: mod_base = OTHER; note = 5-methyl cytidine
  modified_base 19..20: mod_base = OTHER; note = 5-methyl cytidine
ggataggataggagcgagcc

SEQ ID NO: 199 - RNA, 20 nt, synthetic construct
  source 1..20: mol_type = other RNA
  modified_base 1..20: mod_base = OTHER; note = Phosphorothioate linkage
  modified_base 1..2: mod_base = OTHER; note = locked nucleic acid
  modified_base 3: mod_base = OTHER; note = 2'-O-(2-methoxyethyl) ribonucleotide
  modified_base 4: mod_base = OTHER; note = locked nucleic acid
  modified_base 5: mod_base = OTHER; note = 2'-O-(2-methoxyethyl) ribonucleotide
  modified_base 6: mod_base = OTHER; note = locked nucleic acid
  modified_base 7: mod_base = OTHER; note = 2'-O-(2-methoxyethyl) ribonucleotide
  modified_base 8: mod_base = OTHER; note = locked nucleic acid
  modified_base 9: mod_base = OTHER; note = 2'-O-(2-methoxyethyl) ribonucleotide
  modified_base 10: mod_base = OTHER; note = locked nucleic acid
  modified_base 11: mod_base = OTHER; note = 2'-O-(2-methoxyethyl) ribonucleotide
  modified_base 12: mod_base = OTHER; note = locked nucleic acid
  modified_base 13: mod_base = OTHER; note = 2'-O-(2-methoxyethyl) ribonucleotide
  modified_base 14: mod_base = OTHER; note = locked nucleic acid
  modified_base 15: mod_base = OTHER; note = 2'-O-(2-methoxyethyl) ribonucleotide
  modified_base 16..17: mod_base = OTHER; note = locked nucleic acid
  modified_base 18: mod_base = OTHER; note = 2'-O-(2-methoxyethyl) ribonucleotide
  modified_base 19..20: mod_base = OTHER; note = locked nucleic acid
  modified_base 15: mod_base = OTHER; note = 5-methyl cytidine
  modified_base 19..20: mod_base = OTHER; note = 5-methyl cytidine
ggataggataggagcgagcc

SEQ ID NO: 200 - DNA, 20 bp, synthetic construct
  source 1..20: mol_type = other DNA
  modified_base 1..20: mod_base = OTHER; note = Phosphorothioate linkage
  modified_base 1..5: mod_base = OTHER; note = 2'-O-(2-methoxyethyl) ribonucleotide
  misc_feature 6..8: note = DNA
  modified_base 9: mod_base = OTHER; note = 2'-O-(2-methoxyethyl) ribonucleotide
  misc_feature 10..11: note = DNA
  modified_base 12: mod_base = OTHER; note = 2'-O-(2-methoxyethyl) ribonucleotide
  misc_feature 13..15: note = DNA
  modified_base 16..20: mod_base = OTHER; note = 2'-O-(2-methoxyethyl) ribonucleotide
  modified_base 10: mod_base = OTHER; note = 5-methyl cytidine
  modified_base 12: mod_base = OTHER; note = 5-methyl cytidine
taggagaatcgctttgggag

SEQ ID NO: 201 - DNA, 20 bp, synthetic construct
  source 1..20: mol_type = other DNA
  modified_base 1..20: mod_base = OTHER; note = Phosphorothioate linkage
  modified_base 1..5: mod_base = OTHER; note = 2'-O-(2-methoxyethyl) ribonucleotide
  modified_base 6: mod_base = OTHER; note = locked nucleic acid
  misc_feature 7..8: note = DNA
  modified_base 9: mod_base = OTHER; note = locked nucleic acid
  misc_feature 10..11: note = DNA
  modified_base 12: mod_base = OTHER; note = locked nucleic acid
  misc_feature 13..14: note = DNA
  modified_base 15: mod_base = OTHER; note = locked nucleic acid
  modified_base 16..20: mod_base = OTHER; note = 2'-O-(2-methoxyethyl) ribonucleotide
  modified_base 10: mod_base = OTHER; note = 5-methyl cytidine
  modified_base 12: mod_base = OTHER; note = 5-methyl cytidine
taggagaatcgctttgggag

SEQ ID NO: 202 - DNA, 20 bp, synthetic construct
  source 1..20: mol_type = other DNA
  modified_base 1..20: mod_base = OTHER; note = Phosphorothioate linkage
  modified_base 1..3: mod_base = OTHER; note = 2'-O-(2-methoxyethyl) ribonucleotide
  modified_base 4: mod_base = OTHER; note = locked nucleic acid
  modified_base 5: mod_base = OTHER; note = 2'-O-(2-methoxyethyl) ribonucleotide
  misc_feature 6..7: note = DNA
  modified_base 8: mod_base = OTHER; note = locked nucleic acid
  misc_feature 9..11: note = DNA
  modified_base 12: mod_base = OTHER; note = locked nucleic acid
  misc_feature 13..15: note = DNA
  modified_base 16: mod_base = OTHER; note = locked nucleic acid
  modified_base 17..20: mod_base = OTHER; note = 2'-O-(2-methoxyethyl) ribonucleotide
  modified_base 10: mod_base = OTHER; note = 5-methyl cytidine
  modified_base 12: mod_base = OTHER; note = 5-methyl cytidine
taggagaatcgctttgggag

SEQ ID NO: 203 - DNA, 20 bp, synthetic construct
  source 1..20: mol_type = other DNA
  modified_base 1..20: mod_base = OTHER; note = Phosphorothioate linkage
  modified_base 1..4: mod_base = OTHER; note = 2'-O-(2-methoxyethyl) ribonucleotide
  modified_base 5: mod_base = OTHER; note = locked nucleic acid
  misc_feature 6..8: note = DNA
  modified_base 9: mod_base = OTHER; note = locked nucleic acid
  misc_feature 10..12: note = DNA
  modified_base 13: mod_base = OTHER; note = locked nucleic acid
  misc_feature 14..15: note = DNA
  modified_base 16: mod_base = OTHER; note = 2'-O-(2-methoxyethyl) ribonucleotide
  modified_base 17: mod_base = OTHER; note = locked nucleic acid
  modified_base 18..20: mod_base = OTHER; note = 2'-O-(2-methoxyethyl) ribonucleotide
  modified_base 10: mod_base = OTHER; note = 5-methyl cytidine
taggagaatcgctttgggag

SEQ ID NO: 204 - RNA, 20 nt, synthetic construct
  source 1..20: mol_type = other RNA
  modified_base 1..20: mod_base = OTHER; note = Phosphorothioate linkage
  modified_base 1..5: mod_base = OTHER; note = 2'-O-(2-methoxyethyl) ribonucleotide
  modified_base 6: mod_base = OTHER; note = locked nucleic acid
  modified_base 7..8: mod_base = OTHER; note = 2'-O-(2-methoxyethyl) ribonucleotide
  modified_base 9: mod_base = OTHER; note = locked nucleic acid
  modified_base 10..11: mod_base = OTHER; note = 2'-O-(2-methoxyethyl) ribonucleotide
  modified_base 12: mod_base = OTHER; note = locked nucleic acid
  modified_base 13..14: mod_base = OTHER; note = 2'-O-(2-methoxyethyl) ribonucleotide
  modified_base 15: mod_base = OTHER; note = locked nucleic acid
  modified_base 16..20: mod_base = OTHER; note = 2'-O-(2-methoxyethyl) ribonucleotide
  modified_base 10: mod_base = OTHER; note = 5-methyl cytidine
  modified_base 12: mod_base = OTHER; note = 5-methyl cytidine
taggagaatcgctttgggag

SEQ ID NO: 205 - RNA, 20 nt, synthetic construct
  source 1..20: mol_type = other RNA
  modified_base 1..20: mod_base = OTHER; note = Phosphorothioate linkage
  modified_base 1..3: mod_base = OTHER; note = 2'-O-(2-methoxyethyl) ribonucleotide
  modified_base 4: mod_base = OTHER; note = locked nucleic acid
  modified_base 5: mod_base = OTHER; note = 2'-O-(2-methoxyethyl) ribonucleotide
  modified_base 6: mod_base = OTHER; note = locked nucleic acid
  modified_base 7: mod_base = OTHER; note = 2'-O-(2-methoxyethyl) ribonucleotide
  modified_base 8: mod_base = OTHER; note = locked nucleic acid
  modified_base 9: mod_base = OTHER; note = 2'-O-(2-methoxyethyl) ribonucleotide
  modified_base 10: mod_base = OTHER; note = locked nucleic acid
  modified_base 11: mod_base = OTHER; note = 2'-O-(2-methoxyethyl) ribonucleotide
  modified_base 12: mod_base = OTHER; note = locked nucleic acid
  modified_base 13: mod_base = OTHER; note = 2'-O-(2-methoxyethyl) ribonucleotide
  modified_base 14: mod_base = OTHER; note = locked nucleic acid
  modified_base 15: mod_base = OTHER; note = 2'-O-(2-methoxyethyl) ribonucleotide
  modified_base 16: mod_base = OTHER; note = locked nucleic acid
  modified_base 17: mod_base = OTHER; note = 2'-O-(2-methoxyethyl) ribonucleotide
  modified_base 18: mod_base = OTHER; note = locked nucleic acid
  modified_base 19..20: mod_base = OTHER; note = 2'-O-(2-methoxyethyl) ribonucleotide
  modified_base 10: mod_base = OTHER; note = 5-methyl cytidine
  modified_base 12: mod_base = OTHER; note = 5-methyl cytidine
taggagaatcgctttgggag

SEQ ID NO: 206 - RNA, 20 nt, synthetic construct
  source 1..20: mol_type = other RNA
  modified_base 1..20: mod_base = OTHER; note = Phosphorothioate linkage
  modified_base 1..2: mod_base = OTHER; note = 2'-O-(2-methoxyethyl) ribonucleotide
  modified_base 3: mod_base = OTHER; note = locked nucleic acid
  modified_base 4: mod_base = OTHER; note = 2'-O-(2-methoxyethyl) ribonucleotide
  modified_base 5: mod_base = OTHER; note = locked nucleic acid
  modified_base 6: mod_base = OTHER; note = 2'-O-(2-methoxyethyl) ribonucleotide
  modified_base 7: mod_base = OTHER; note = locked nucleic acid
  modified_base 8: mod_base = OTHER; note = 2'-O-(2-methoxyethyl) ribonucleotide
  modified_base 9: mod_base = OTHER; note = locked nucleic acid
  modified_base 10: mod_base = OTHER; note = 2'-O-(2-methoxyethyl) ribonucleotide
  modified_base 11: mod_base = OTHER; note = locked nucleic acid
  modified_base 12: mod_base = OTHER; note = 2'-O-(2-methoxyethyl) ribonucleotide
  modified_base 13: mod_base = OTHER; note = locked nucleic acid
  modified_base 14: mod_base = OTHER; note = 2'-O-(2-methoxyethyl) ribonucleotide
  modified_base 15: mod_base = OTHER; note = locked nucleic acid
  modified_base 16: mod_base = OTHER; note = 2'-O-(2-methoxyethyl) ribonucleotide
  modified_base 17: mod_base = OTHER; note = locked nucleic acid
  modified_base 18..20: mod_base = OTHER; note = 2'-O-(2-methoxyethyl) ribonucleotide
  modified_base 10: mod_base = OTHER; note = 5-methyl cytidine
  modified_base 12: mod_base = OTHER; note = 5-methyl cytidine
taggagaatcgctttgggag

SEQ ID NO: 207 - RNA, 20 nt, synthetic construct
  source 1..20: mol_type = other RNA
  modified_base 1..20: mod_base = OTHER; note = Phosphorothioate linkage
  modified_base 1..2: mod_base = OTHER; note = 2'-O-(2-methoxyethyl) ribonucleotide
  modified_base 3: mod_base = OTHER; note = locked nucleic acid
  modified_base 4..5: mod_base = OTHER; note = 2'-O-(2-methoxyethyl) ribonucleotide
  modified_base 6: mod_base = OTHER; note = locked nucleic acid
  modified_base 7..8: mod_base = OTHER; note = 2'-O-(2-methoxyethyl) ribonucleotide
  modified_base 9: mod_base = OTHER; note = locked nucleic acid
  modified_base 10..11: mod_base = OTHER; note = 2'-O-(2-methoxyethyl) ribonucleotide
  modified_base 12: mod_base = OTHER; note = locked nucleic acid
  modified_base 13..14: mod_base = OTHER; note = 2'-O-(2-methoxyethyl) ribonucleotide
  modified_base 15: mod_base = OTHER; note = locked nucleic acid
  modified_base 16..17: mod_base = OTHER; note = 2'-O-(2-methoxyethyl) ribonucleotide
  modified_base 18: mod_base = OTHER; note = locked nucleic acid
  modified_base 19..20: mod_base = OTHER; note = 2'-O-(2-methoxyethyl) ribonucleotide
  modified_base 10: mod_base = OTHER; note = 5-methyl cytidine
  modified_base 12: mod_base = OTHER; note = 5-methyl cytidine
taggagaatcgctttgggag

SEQ ID NO: 208 - RNA, 20 nt, synthetic construct
  source 1..20: mol_type = other RNA
  modified_base 1..20: mod_base = OTHER; note = Phosphorothioate linkage
  modified_base 1..4: mod_base = OTHER; note = 2'-O-(2-methoxyethyl) ribonucleotide
  modified_base 5: mod_base = OTHER; note = locked nucleic acid
  modified_base 6..8: mod_base = OTHER; note = 2'-O-(2-methoxyethyl) ribonucleotide
  modified_base 9: mod_base = OTHER; note = locked nucleic acid
  modified_base 10..12: mod_base = OTHER; note = 2'-O-(2-methoxyethyl) ribonucleotide
  modified_base 13: mod_base = OTHER; note = locked nucleic acid
  modified_base 14..16: mod_base = OTHER; note = 2'-O-(2-methoxyethyl) ribonucleotide
  modified_base 17: mod_base = OTHER; note = locked nucleic acid
  modified_base 18..20: mod_base = OTHER; note = 2'-O-(2-methoxyethyl) ribonucleotide
  modified_base 10: mod_base = OTHER; note = 5-methyl cytidine
  modified_base 12: mod_base = OTHER; note = 5-methyl cytidine
taggagaatcgctttgggag

SEQ ID NO: 209 - RNA, 20 nt, synthetic construct
  source 1..20: mol_type = other RNA
  modified_base 1..20: mod_base = OTHER; note = Phosphorothioate linkage
  modified_base 1..3: mod_base = OTHER; note = 2'-O-(2-methoxyethyl) ribonucleotide
  modified_base 4: mod_base = OTHER; note = locked nucleic acid
  modified_base 5..7: mod_base = OTHER; note = 2'-O-(2-methoxyethyl) ribonucleotide
  modified_base 8: mod_base = OTHER; note = locked nucleic acid
  modified_base 9..11: mod_base = OTHER; note = 2'-O-(2-methoxyethyl) ribonucleotide
  modified_base 12: mod_base = OTHER; note = locked nucleic acid
  modified_base 13..15: mod_base = OTHER; note = 2'-O-(2-methoxyethyl) ribonucleotide
  modified_base 16: mod_base = OTHER; note = locked nucleic acid
  modified_base 17..20: mod_base = OTHER; note = 2'-O-(2-methoxyethyl) ribonucleotide
  modified_base 10: mod_base = OTHER; note = 5-methyl cytidine
  modified_base 12: mod_base = OTHER; note = 5-methyl cytidine
taggagaatcgctttgggag

SEQ ID NO: 210 - RNA, 20 nt, synthetic construct
  source 1..20: mol_type = other RNA
  modified_base 1..20: mod_base = OTHER; note = Phosphorothioate linkage
  modified_base 1..5: mod_base = OTHER; note = 2'-O-(2-methoxyethyl) ribonucleotide
  modified_base 6: mod_base = OTHER; note = locked nucleic acid
  modified_base 7..10: mod_base = OTHER; note = 2'-O-(2-methoxyethyl) ribonucleotide
  modified_base 11: mod_base = OTHER; note = locked nucleic acid
  modified_base 12..15: mod_base = OTHER; note = 2'-O-(2-methoxyethyl) ribonucleotide
  modified_base 16: mod_base = OTHER; note = locked nucleic acid
  modified_base 17..20: mod_base = OTHER; note = 2'-O-(2-methoxyethyl) ribonucleotide
  modified_base 10: mod_base = OTHER; note = 5-methyl cytidine
  modified_base 12: mod_base = OTHER; note = 5-methyl cytidine
taggagaatcgctttgggag

SEQ ID NO: 211 - RNA, 20 nt, synthetic construct
  source 1..20: mol_type = other RNA
  modified_base 1..20: mod_base = OTHER; note = Phosphorothioate linkage
  modified_base 1..4: mod_base = OTHER; note = 2'-O-(2-methoxyethyl) ribonucleotide
  modified_base 5: mod_base = OTHER; note = locked nucleic acid
  modified_base 6..9: mod_base = OTHER; note = 2'-O-(2-methoxyethyl) ribonucleotide
  modified_base 10: mod_base = OTHER; note = locked nucleic acid
  modified_base 11..14: mod_base = OTHER; note = 2'-O-(2-methoxyethyl) ribonucleotide
  modified_base 15: mod_base = OTHER; note = locked nucleic acid
  modified_base 16..20: mod_base = OTHER; note = 2'-O-(2-methoxyethyl) ribonucleotide
  modified_base 10: mod_base = OTHER; note = 5-methyl cytidine
  modified_base 12: mod_base = OTHER; note = 5-methyl cytidine
taggagaatcgctttgggag

SEQ ID NO: 212 - DNA, 22 bp, synthetic construct
  source 1..22: mol_type = other DNA
  modified_base 1..22: mod_base = OTHER; note = Phosphorothioate linkage
  modified_base 1..6: mod_base = OTHER; note = 2'-O-(2-methoxyethyl) ribonucleotide
  misc_feature 7..16: note = DNA
  modified_base 17..22: mod_base = OTHER; note = 2'-O-(2-methoxyethyl) ribonucleotide
  modified_base 11: mod_base = OTHER; note = 5-methyl cytidine
  modified_base 13: mod_base = OTHER; note = 5-methyl cytidine
  modified_base 22: mod_base = OTHER; note = 5-methyl cytidine
gtaggagaatcgctttgggagc

SEQ ID NO: 213 - RNA, 22 nt, synthetic construct
  source 1..22: mol_type = other RNA
  modified_base 1..22: mod_base = OTHER; note = Phosphorothioate linkage
  modified_base 1..22: mod_base = OTHER; note = 2'-O-(2-methoxyethyl) ribonucleotide
  modified_base 11: mod_base = OTHER; note = 5-methyl cytidine
  modified_base 13: mod_base = OTHER; note = 5-methyl cytidine
  modified_base 22: mod_base = OTHER; note = 5-methyl cytidine
gtaggagaatcgctttgggagc

SEQ ID NO: 214 - DNA, 22 bp, synthetic construct
  source 1..22: mol_type = other DNA
  modified_base 1..22: mod_base = OTHER; note = Phosphorothioate linkage
  modified_base 1..5: mod_base = OTHER; note = 2'-O-(2-methoxyethyl) ribonucleotide
  misc_feature 6..8: note = DNA
  modified_base 9: mod_base = OTHER; note = 2'-O-(2-methoxyethyl) ribonucleotide
  misc_feature 10..13: note = DNA
  modified_base 14: mod_base = OTHER; note = 2'-O-(2-methoxyethyl) ribonucleotide
  misc_feature 15..17: note = DNA
  modified_base 18..22: mod_base = OTHER; note = 2'-O-(2-methoxyethyl) ribonucleotide
  modified_base 11: mod_base = OTHER; note = 5-methyl cytidine
  modified_base 13: mod_base = OTHER; note = 5-methyl cytidine
  modified_base 22: mod_base = OTHER; note = 5-methyl cytidine
gtaggagaatcgctttgggagc

SEQ ID NO: 215 - DNA, 22 bp, synthetic construct
  source 1..22: mol_type = other DNA
  modified_base 1..22: mod_base = OTHER; note = Phosphorothioate linkage
  modified_base 1..5: mod_base = OTHER; note = 2'-O-(2-methoxyethyl) ribonucleotide
  modified_base 6: mod_base = OTHER; note = locked nucleic acid
  misc_feature 7..8: note = DNA
  modified_base 9: mod_base = OTHER; note = locked nucleic acid
  misc_feature 10..13: note = DNA
  modified_base 14: mod_base = OTHER; note = locked nucleic acid
  misc_feature 15..16: note = DNA
  modified_base 17: mod_base = OTHER; note = locked nucleic acid
  modified_base 18..22: mod_base = OTHER; note = 2'-O-(2-methoxyethyl) ribonucleotide
  modified_base 11: mod_base = OTHER; note = 5-methyl cytidine
  modified_base 13: mod_base = OTHER; note = 5-methyl cytidine
  modified_base 22: mod_base = OTHER; note = 5-methyl cytidine
gtaggagaatcgctttgggagc

SEQ ID NO: 216 - DNA, 24 bp, synthetic construct
  source 1..24: mol_type = other DNA
  modified_base 1..24: mod_base = OTHER; note = Phosphorothioate linkage
  modified_base 1..7: mod_base = OTHER; note = 2'-O-(2-methoxyethyl) ribonucleotide
  misc_feature 8..17: note = DNA
  modified_base 18..24: mod_base = OTHER; note = 2'-O-(2-methoxyethyl) ribonucleotide
  modified_base 12: mod_base = OTHER; note = 5-methyl cytidine
  modified_base 14: mod_base = OTHER; note = 5-methyl cytidine
  modified_base 23: mod_base = OTHER; note = 5-methyl cytidine
ggtaggagaatcgctttgggagca

SEQ ID NO: 217 - RNA, 24 nt, synthetic construct
  source 1..24: mol_type = other RNA
  modified_base 1..24: mod_base = OTHER; note = Phosphorothioate linkage
  modified_base 1..24: mod_base = OTHER; note = 2'-O-(2-methoxyethyl) ribonucleotide
  modified_base 12: mod_base = OTHER; note = 5-methyl cytidine
  modified_base 14: mod_base = OTHER; note = 5-methyl cytidine
  modified_base 23: mod_base = OTHER; note = 5-methyl cytidine
ggtaggagaatcgctttgggagca

SEQ ID NO: 218 - DNA, 24 bp, synthetic construct
  source 1..24: mol_type = other DNA
  modified_base 1..24: mod_base = OTHER; note = Phosphorothioate linkage
  modified_base 1..5: mod_base = OTHER; note = 2'-O-(2-methoxyethyl) ribonucleotide
  misc_feature 6..7: note = DNA
  modified_base 8: mod_base = OTHER; note = 2'-O-(2-methoxyethyl) ribonucleotide
  misc_feature 9..10: note = DNA
  modified_base 11: mod_base = OTHER; note = 2'-O-(2-methoxyethyl) ribonucleotide
  misc_feature 12..13: note = DNA
  modified_base 14: mod_base = OTHER; note = 2'-O-(2-methoxyethyl) ribonucleotide
  misc_feature 15..16: note = DNA
  modified_base 17: mod_base = OTHER; note = 2'-O-(2-methoxyethyl) ribonucleotide
  misc_feature 18..19: note = DNA
  modified_base 20..24: mod_base = OTHER; note = 2'-O-(2-methoxyethyl) ribonucleotide
  modified_base 12: mod_base = OTHER; note = 5-methyl cytidine
  modified_base 14: mod_base = OTHER; note = 5-methyl cytidine
  modified_base 23: mod_base = OTHER; note = 5-methyl cytidine
ggtaggagaatcgctttgggagca

SEQ ID NO: 219 - DNA, 24 bp, synthetic construct
  source 1..24: mol_type = other DNA
  modified_base 1..24: mod_base = OTHER; note = Phosphorothioate linkage
  modified_base 1..5: mod_base = OTHER; note = 2'-O-(2-methoxyethyl) ribonucleotide
  misc_feature 6..7: note = DNA
  modified_base 8: mod_base = OTHER; note = locked nucleic acid
  misc_feature 9..10: note = DNA
  modified_base 11: mod_base = OTHER; note = locked nucleic acid
  misc_feature 12..13: note = DNA
  modified_base 14: mod_base = OTHER; note = locked nucleic acid
  misc_feature 15..16: note = DNA
  modified_base 17: mod_base = OTHER; note = locked nucleic acid
  misc_feature 18..19: note = DNA
  modified_base 20..24: mod_base = OTHER; note = 2'-O-(2-methoxyethyl) ribonucleotide
  modified_base 12: mod_base = OTHER; note = 5-methyl cytidine
  modified_base 14: mod_base = OTHER; note = 5-methyl cytidine
  modified_base 23: mod_base = OTHER; note = 5-methyl cytidine
ggtaggagaatcgctttgggagca

SEQ ID NO: 220 - RNA, 20 nt, synthetic construct
  source 1..20: mol_type = other RNA
  modified_base 1..3: mod_base = OTHER; note = Phosphorothioate linkage
  modified_base 6..15: mod_base = OTHER; note = Phosphorothioate linkage
  modified_base 1..9: mod_base = OTHER; note = Phosphorothioate linkage
  modified_base 18..20: mod_base = OTHER; note = 2'-O-(2-methoxyethyl) ribonucleotide
  modified_base 10: mod_base = OTHER; note = 5-methyl cytidine
  modified_base 12: mod_base = OTHER; note = 5-methyl cytidine
  modified_base 3..5: mod_base = OTHER; note = Phosphorothioate linkage
  modified_base 15..17: mod_base = OTHER; note = Phosphorothioate linkage
taggagaatcgctttgggag

SEQ ID NO: 221 - RNA, 20 nt, synthetic construct
  source 1..20: mol_type = other RNA
  modified_base 1..4: mod_base = OTHER; note = Phosphorothioate linkage
  modified_base 7..14: mod_base = OTHER; note = Phosphorothioate linkage
  modified_base 17..20: mod_base = OTHER; note = Phosphorothioate linkage
  modified_base 1..20: mod_base = OTHER; note = 2'-O-(2-methoxyethyl) ribonucleotide
  modified_base 10: mod_base = OTHER; note = 5-methyl cytidine
  modified_base 12: mod_base = OTHER; note = 5-methyl cytidine
  modified_base 4..6: mod_base = OTHER; note = Phosphorothioate linkage
  modified_base 14..16: mod_base = OTHER; note = Phosphorothioate linkage
taggagaatcgctttgggag

SEQ ID NO: 222 - RNA, 20 nt, synthetic construct
  source 1..20: mol_type = other RNA
  modified_base 1..3: mod_base = OTHER; note = Phosphorothioate linkage
  modified_base 4..6: mod_base = OTHER; note = Phosphorothioate linkage
  modified_base 7..9: mod_base = OTHER; note = Phosphorothioate linkage
  modified_base 10..12: mod_base = OTHER; note = Phosphorothioate linkage
  modified_base 13..15: mod_base = OTHER; note = Phosphorothioate linkage
  modified_base 16..18: mod_base = OTHER; note = Phosphorothioate linkage
  modified_base 19..20: mod_base = OTHER; note = Phosphorothioate linkage
  modified_base 1..20: mod_base = OTHER; note = 2'-O-(2-methoxyethyl) ribonucleotide
  modified_base 10: mod_base = OTHER; note = 5-methyl cytidine
  modified_base 12: mod_base = OTHER; note = 5-methyl cytidine
  modified_base 3: mod_base = OTHER; note = Phosphorothioate linkage
  modified_base 6: mod_base = OTHER; note = Phosphorothioate linkage
  modified_base 9: mod_base = OTHER; note = Phosphorothioate linkage
  modified_base 12: mod_base = OTHER; note = Phosphorothioate linkage
  modified_base 15: mod_base = OTHER; note = Phosphorothioate linkage
  modified_base 18: mod_base = OTHER; note = Phosphorothioate linkage
taggagaatcgctttgggag

SEQ ID NO: 223 - RNA, 20 nt, synthetic construct
  source 1..20: mol_type = other RNA
  modified_base 1..2: mod_base = OTHER; note = Phosphorothioate linkage
  modified_base 3..5: mod_base = OTHER; note = Phosphorothioate linkage
  modified_base 6..8: mod_base = OTHER; note = Phosphorothioate linkage
  modified_base 9..11: mod_base = OTHER; note = Phosphorothioate linkage
  modified_base 12..14: mod_base = OTHER; note = Phosphorothioate linkage
  modified_base 15..17: mod_base = OTHER; note = Phosphorothioate linkage
  modified_base 18..20: mod_base = OTHER; note = Phosphorothioate linkage
  modified_base 1..20: mod_base = OTHER; note = 2'-O-(2-methoxyethyl) ribonucleotide
  modified_base 10: mod_base = OTHER; note = 5-methyl cytidine
  modified_base 12: mod_base = OTHER; note = 5-methyl cytidine
  modified_base 2: mod_base = OTHER; note = Phosphorothioate linkage
  modified_base 5: mod_base = OTHER; note = Phosphorothioate linkage
  modified_base 8: mod_base = OTHER; note = Phosphorothioate linkage
  modified_base 11: mod_base = OTHER; note = Phosphorothioate linkage
  modified_base 14: mod_base = OTHER; note = Phosphorothioate linkage
  modified_base 17: mod_base = OTHER; note = Phosphorothioate linkage
taggagaatcgctttgggag

SEQ ID NO: 224 - RNA, 20 nt, synthetic construct
  source 1..20: mol_type = other RNA
  modified_base 1..3: mod_base = OTHER; note = Phosphorothioate linkage
  modified_base 5..16: mod_base = OTHER; note = Phosphorothioate linkage
  modified_base 18..20: mod_base = OTHER; note = Phosphorothioate linkage
  modified_base 1..20: mod_base = OTHER; note = 2'-O-(2-methoxyethyl) ribonucleotide
  modified_base 10: mod_base = OTHER; note = 5-methyl cytidine
  modified_base 12: mod_base = OTHER; note = 5-methyl cytidine
  modified_base 3..4: mod_base = OTHER; note = Phosphorothioate linkage
  modified_base 16..17: mod_base = OTHER; note = Phosphorothioate linkage
taggagaatcgctttgggag

SEQ ID NO: 225 - RNA, 20 nt, synthetic construct
  source 1..20: mol_type = other RNA
  modified_base 1..10: mod_base = OTHER; note = Phosphorothioate linkage
  modified_base 18..20: mod_base = OTHER; note = Phosphorothioate linkage
  modified_base 1..20: mod_base = OTHER; note = 2'-O-(2-methoxyethyl) ribonucleotide
  modified_base 10: mod_base = OTHER; note = 5-methyl cytidine
  modified_base 12: mod_base = OTHER; note = 5-methyl cytidine
  modified_base 10..17: mod_base = OTHER; note = Phosphorothioate linkage
taggagaatcgctttgggag

SEQ ID NO: 226 - RNA, 20 nt, synthetic construct
  source 1..20: mol_type = other RNA
  modified_base 1..12: mod_base = OTHER; note = Phosphorothioate linkage
  modified_base 18..20: mod_base = OTHER; note = Phosphorothioate linkage
  modified_base 1..20: mod_base = OTHER; note = 2'-O-(2-methoxyethyl) ribonucleotide
  modified_base 10: mod_base = OTHER; note = 5-methyl cytidine
  modified_base 12: mod_base = OTHER; note = 5-methyl cytidine
  modified_base 12..17: mod_base = OTHER; note = Phosphorothioate linkage
taggagaatcgctttgggag

SEQ ID NO: 227 - RNA, 20 nt, synthetic construct
  source 1..20: mol_type = other RNA
  modified_base 1..14: mod_base = OTHER; note = Phosphorothioate linkage
  modified_base 18..20: mod_base = OTHER; note = Phosphorothioate linkage
  modified_base 1..20: mod_base = OTHER; note = 2'-O-(2-methoxyethyl) ribonucleotide
  modified_base 10: mod_base = OTHER; note = 5-methyl cytidine
  modified_base 12: mod_base = OTHER; note = 5-methyl cytidine
  modified_base 14..17: mod_base = OTHER; note = Phosphorothioate linkage
taggagaatcgctttgggag

SEQ ID NO: 228 - RNA, 20 nt, synthetic construct
  source 1..20: mol_type = other RNA
  modified_base 1..3: mod_base = OTHER; note = Phosphorothioate linkage
  modified_base 13..20: mod_base = OTHER; note = Phosphorothioate linkage
  modified_base 1..20: mod_base = OTHER; note = 2'-O-(2-methoxyethyl) ribonucleotide
  modified_base 10: mod_base = OTHER; note = 5-methyl cytidine
  modified_base 12: mod_base = OTHER; note = 5-methyl cytidine
taggagaatcgctttgggag

SEQ ID NO: 229 - RNA, 20 nt, synthetic construct
  source 1..20: mol_type = other RNA
  modified_base 1..3: mod_base = OTHER; note = Phosphorothioate linkage
  modified_base 15..20: mod_base = OTHER; note = Phosphorothioate linkage
  modified_base 1..20: mod_base = OTHER; note = 2'-O-(2-methoxyethyl) ribonucleotide
  modified_base 10: mod_base = OTHER; note = 5-methyl cytidine
  modified_base 12: mod_base = OTHER; note = 5-methyl cytidine
taggagaatcgctttgggag

SEQ ID NO: 230 - RNA, 20 nt, synthetic construct
  source 1..20: mol_type = other RNA
  modified_base 1..3: mod_base = OTHER; note = Phosphorothioate linkage
  modified_base 17..20: mod_base = OTHER; note = Phosphorothioate linkage
  modified_base 1..20: mod_base = OTHER; note = 2'-O-(2-methoxyethyl) ribonucleotide
  modified_base 10: mod_base = OTHER; note = 5-methyl cytidine
  modified_base 12: mod_base = OTHER; note = 5-methyl cytidine
taggagaatcgctttgggag

SEQ ID NO: 231 - RNA, 20 nt, synthetic construct
  source 1..20: mol_type = other RNA
  modified_base 1..4: mod_base = OTHER; note = Phosphorothioate linkage
  modified_base 18..20: mod_base = OTHER; note = Phosphorothioate linkage
  modified_base 1..20: mod_base = OTHER; note = 2'-O-(2-methoxyethyl) ribonucleotide
  modified_base 10: mod_base = OTHER; note = 5-methyl cytidine
  modified_base 12: mod_base = OTHER; note = 5-methyl cytidine
taggagaatcgctttgggag

SEQ ID NO: 232 - RNA, 20 nt, synthetic construct
  source 1..20: mol_type = other RNA
  modified_base 1..6: mod_base = OTHER; note = Phosphorothioate linkage
  modified_base 18..20: mod_base = OTHER; note = Phosphorothioate linkage
  modified_base 1..20: mod_base = OTHER; note = 2'-O-(2-methoxyethyl) ribonucleotide
  modified_base 10: mod_base = OTHER; note = 5-methyl cytidine
  modified_base 12: mod_base = OTHER; note = 5-methyl cytidine
taggagaatcgctttgggag

SEQ ID NO: 233 - RNA, 20 nt, synthetic construct
  source 1..20: mol_type = other RNA
  modified_base 1..8: mod_base = OTHER; note = Phosphorothioate linkage
  modified_base 18..20: mod_base = OTHER; note = Phosphorothioate linkage
  modified_base 1..20: mod_base = OTHER; note = 2'-O-(2-methoxyethyl) ribonucleotide
  modified_base 10: mod_base = OTHER; note = 5-methyl cytidine
  modified_base 12: mod_base = OTHER; note = 5-methyl cytidine
taggagaatcgctttgggag

SEQ ID NO: 234 - RNA, 20 nt, synthetic construct
  source 1..20: mol_type = other RNA
  modified_base 1..10: mod_base = OTHER; note = Phosphorothioate linkage
  modified_base 18..20: mod_base = OTHER; note = Phosphorothioate linkage
  modified_base 1..20: mod_base = OTHER; note = 2'-O-(2-methoxyethyl) ribonucleotide
  modified_base 10: mod_base = OTHER; note = 5-methyl cytidine
  modified_base 12: mod_base = OTHER; note = 5-methyl cytidine
taggagaatcgctttgggag

SEQ ID NO: 235 - RNA, 20 nt, synthetic construct
  source 1..20: mol_type = other RNA
  modified_base 1..12: mod_base = OTHER; note = Phosphorothioate linkage
  modified_base 18..20: mod_base = OTHER; note = Phosphorothioate linkage
  modified_base 1..20: mod_base = OTHER; note = 2'-O-(2-methoxyethyl) ribonucleotide
  modified_base 10: mod_base = OTHER; note = 5-methyl cytidine
  modified_base 12: mod_base = OTHER; note = 5-methyl cytidine
taggagaatcgctttgggag

SEQ ID NO: 236 - RNA, 20 nt, synthetic construct
  source 1..20: mol_type = other RNA
  modified_base 1..14: mod_base = OTHER; note = Phosphorothioate linkage
  modified_base 18..20: mod_base = OTHER; note = Phosphorothioate linkage
  modified_base 1..20: mod_base = OTHER; note = 2'-O-(2-methoxyethyl) ribonucleotide
  modified_base 10: mod_base = OTHER; note = 5-methyl cytidine
  modified_base 12: mod_base = OTHER; note = 5-methyl cytidine
taggagaatcgctttgggag

SEQ ID NO: 237 - RNA, 21 nt, synthetic construct
  source 1..21: mol_type = other RNA
  modified_base 1..21: mod_base = OTHER; note = Phosphorothioate linkage
  modified_base 1..5: mod_base = OTHER; note = 2'-O-(2-methoxyethyl) ribonucleotide
  misc_feature 6..16: note = DNA
  modified_base 17..21: mod_base = OTHER; note = 2'-O-(2-methoxyethyl) ribonucleotide
  modified_base 4: mod_base = OTHER; note = 5-methyl cytidine
  modified_base 18: mod_base = OTHER; note = 5-methyl cytidine
ggacttgggagtggtgactga

SEQ ID NO: 238 - RNA, 21 nt, synthetic construct
  source 1..21: mol_type = other RNA
  modified_base 1..21: mod_base = OTHER; note = Phosphorothioate linkage
  modified_base 1..5: mod_base = OTHER; note = 2'-O-(2-methoxyethyl) ribonucleotide
  misc_feature 6..8: note = DNA
  modified_base 9: mod_base = OTHER; note = 2'-O-(2-methoxyethyl) ribonucleotide
  misc_feature 10..12: note = DNA
  modified_base 13: mod_base = OTHER; note = 2'-O-(2-methoxyethyl) ribonucleotide
  misc_feature 14..16: note = DNA
  modified_base 17..21: mod_base = OTHER; note = 2'-O-(2-methoxyethyl) ribonucleotide
  modified_base 4: mod_base = OTHER; note = 5-methyl cytidine
  modified_base 18: mod_base = OTHER; note = 5-methyl cytidine
ggacttgggagtggtgactga

SEQ ID NO: 239 - RNA, 21 nt, synthetic construct
  source 1..21: mol_type = other RNA
  modified_base 1..21: mod_base = OTHER; note = Phosphorothioate linkage
  modified_base 1..3: mod_base = OTHER; note = 2'-O-(2-methoxyethyl) ribonucleotide
  modified_base 4: mod_base = OTHER; note = locked nucleic acid
  modified_base 5: mod_base = OTHER; note = 2'-O-(2-methoxyethyl) ribonucleotide
  modified_base 6: mod_base = OTHER; note = locked nucleic acid
  modified_base 7: mod_base = OTHER; note = 2'-O-(2-methoxyethyl) ribonucleotide
  modified_base 8: mod_base = OTHER; note = locked nucleic acid
  modified_base 9: mod_base = OTHER; note = 2'-O-(2-methoxyethyl) ribonucleotide
  modified_base 10: mod_base = OTHER; note = locked nucleic acid
  modified_base 11: mod_base = OTHER; note = 2'-O-(2-methoxyethyl) ribonucleotide
  modified_base 12: mod_base = OTHER; note = locked nucleic acid
  modified_base 13: mod_base = OTHER; note = 2'-O-(2-methoxyethyl) ribonucleotide
  modified_base 14: mod_base = OTHER; note = locked nucleic acid
  modified_base 15: mod_base = OTHER; note = 2'-O-(2-methoxyethyl) ribonucleotide
  modified_base 16: mod_base = OTHER; note = locked nucleic acid
  modified_base 17: mod_base = OTHER; note = 2'-O-(2-methoxyethyl) ribonucleotide
  modified_base 18: mod_base = OTHER; note = locked nucleic acid
  modified_base 19..21: mod_base = OTHER; note = 2'-O-(2-methoxyethyl) ribonucleotide
  modified_base 4: mod_base = OTHER; note = 5-methyl cytidine
  modified_base 17: mod_base = OTHER; note = 5-methyl cytidine
ggacttgggagtggtgactga

SEQ ID NO: 240 - RNA, 21 nt, synthetic construct
  source 1..21: mol_type = other RNA
  modified_base 1..21: mod_base = OTHER; note = Phosphorothioate linkage
  modified_base 1..3: mod_base = OTHER; note = 2'-O-(2-methoxyethyl) ribonucleotide
  modified_base 4: mod_base = OTHER; note = locked nucleic acid
  modified_base 5..6: mod_base = OTHER; note = 2'-O-(2-methoxyethyl) ribonucleotide
  modified_base 7: mod_base = OTHER; note = locked nucleic acid
  modified_base 8..9: mod_base = OTHER; note = 2'-O-(2-methoxyethyl) ribonucleotide
  modified_base 10: mod_base = OTHER; note = locked nucleic acid
  modified_base 11..12: mod_base = OTHER; note = 2'-O-(2-methoxyethyl) ribonucleotide
  modified_base 13: mod_base = OTHER; note = locked nucleic acid
  modified_base 14..15: mod_base = OTHER; note = 2'-O-(2-methoxyethyl) ribonucleotide
  modified_base 16: mod_base = OTHER; note = locked nucleic acid
  modified_base 17..18: mod_base = OTHER; note = 2'-O-(2-methoxyethyl) ribonucleotide
  modified_base 19: mod_base = OTHER; note = locked nucleic acid
  modified_base 20..21: mod_base = OTHER; note = 2'-O-(2-methoxyethyl) ribonucleotide
  modified_base 4: mod_base = OTHER; note = 5-methyl cytidine
  modified_base 17: mod_base = OTHER; note = 5-methyl cytidine
ggacttgggagtggtgactga

SEQ ID NO: 241 - RNA, 21 nt, synthetic construct
  source 1..21: mol_type = other RNA
  modified_base 1..21: mod_base = OTHER; note = Phosphorothioate linkage
  modified_base 1..2: mod_base = OTHER; note = 2'-O-(2-methoxyethyl) ribonucleotide
  modified_base 3: mod_base = OTHER; note = locked nucleic acid
  modified_base 4..5: mod_base = OTHER; note = 2'-O-(2-methoxyethyl) ribonucleotide
  modified_base 6: mod_base = OTHER; note = locked nucleic acid
  modified_base 7..8: mod_base = OTHER; note = 2'-O-(2-methoxyethyl) ribonucleotide
  modified_base 9: mod_base = OTHER; note = locked nucleic acid
  modified_base 10..11: mod_base = OTHER; note = 2'-O-(2-methoxyethyl) ribonucleotide
  modified_base 12: mod_base = OTHER; note = locked nucleic acid
  modified_base 13..14: mod_base = OTHER; note = 2'-O-(2-methoxyethyl) ribonucleotide
  modified_base 15: mod_base = OTHER; note = locked nucleic acid
  modified_base 16..17: mod_base = OTHER; note = 2'-O-(2-methoxyethyl) ribonucleotide
  modified_base 18: mod_base = OTHER; note = locked nucleic acid
  modified_base 19..21: mod_base = OTHER; note = 2'-O-(2-methoxyethyl) ribonucleotide
  modified_base 4: mod_base = OTHER; note = 5-methyl cytidine
  modified_base 17: mod_base = OTHER; note = 5-methyl cytidine
ggacttgggagtggtgactga

SEQ ID NO: 242 - RNA, 21 nt, synthetic construct
  source 1..21: mol_type = other RNA
  modified_base 1..21: mod_base = OTHER; note = Phosphorothioate linkage
  modified_base 1..4: mod_base = OTHER; note = 2'-O-(2-methoxyethyl) ribonucleotide
  modified_base 5: mod_base = OTHER; note = locked nucleic acid
  modified_base 6..8: mod_base = OTHER; note = 2'-O-(2-methoxyethyl) ribonucleotide
  modified_base 9: mod_base = OTHER; note = locked nucleic acid
  modified_base 10..12: mod_base = OTHER; note = 2'-O-(2-methoxyethyl) ribonucleotide
  modified_base 13: mod_base = OTHER; note = locked nucleic acid
  modified_base 14..16: mod_base = OTHER; note = 2'-O-(2-methoxyethyl) ribonucleotide
  modified_base 17: mod_base = OTHER; note = locked nucleic acid
  modified_base 18..21: mod_base = OTHER; note = 2'-O-(2-methoxyethyl) ribonucleotide
  modified_base 4: mod_base = OTHER; note = 5-methyl cytidine
  modified_base 18: mod_base = OTHER; note = 5-methyl cytidine
ggacttgggagtggtgactga

SEQ ID NO: 243 - RNA, 21 nt, synthetic construct
  source 1..21: mol_type = other RNA
  modified_base 1..21: mod_base = OTHER; note = Phosphorothioate linkage
  modified_base 1..5: mod_base = OTHER; note = 2'-O-(2-methoxyethyl) ribonucleotide
  modified_base 6: mod_base = OTHER; note = locked nucleic acid
  modified_base 7..10: mod_base = OTHER; note = 2'-O-(2-methoxyethyl) ribonucleotide
  modified_base 11: mod_base = OTHER; note = locked nucleic acid
  modified_base 12..15: mod_base = OTHER; note = 2'-O-(2-methoxyethyl) ribonucleotide
  modified_base 16: mod_base = OTHER; note = locked nucleic acid
  modified_base 17..21: mod_base = OTHER; note = 2'-O-(2-methoxyethyl) ribonucleotide
  modified_base 4: mod_base = OTHER; note = 5-methyl cytidine
  modified_base 18: mod_base = OTHER; note = 5-methyl cytidine
ggacttgggagtggtgactga

SEQ ID NO: 244 - RNA, 23 nt, synthetic construct
  source 1..23: mol_type = other RNA
  modified_base 1..23: mod_base = OTHER; note = Phosphorothioate linkage
  modified_base 1..5: mod_base = OTHER; note = 2'-O-(2-methoxyethyl) ribonucleotide
  misc_feature 6..18: note = locked nucleic acid
  modified_base 19..23: mod_base = OTHER; note = 2'-O-(2-methoxyethyl) ribonucleotide
  modified_base 4: mod_base = OTHER; note = 5-methyl cytidine
  modified_base 18: mod_base = OTHER; note = 5-methyl cytidine
  modified_base 23: mod_base = OTHER; note = 5-methyl cytidine
ggacttgggagtggtgactgaac

SEQ ID NO: 245 - RNA, 23 nt, synthetic construct
  source 1..23: mol_type = other RNA
  modified_base 1..23: mod_base = OTHER; note = Phosphorothioate linkage
  modified_base 1..2: mod_base = OTHER; note = 2'-O-(2-methoxyethyl) ribonucleotide
  modified_base 3: mod_base = OTHER; note = locked nucleic acid
  modified_base 4..5: mod_base = OTHER; note = 2'-O-(2-methoxyethyl) ribonucleotide
  modified_base 6: mod_base = OTHER; note = locked nucleic acid
  modified_base 7..8: mod_base = OTHER; note = 2'-O-(2-methoxyethyl) ribonucleotide
  modified_base 9: mod_base = OTHER; note = locked nucleic acid
  modified_base 10..11: mod_base = OTHER; note = 2'-O-(2-methoxyethyl) ribonucleotide
  modified_base 12: mod_base = OTHER; note = locked nucleic acid
  modified_base 13..14: mod_base = OTHER; note = 2'-O-(2-methoxyethyl) ribonucleotide
  modified_base 15: mod_base = OTHER; note = locked nucleic acid
  modified_base 16..17: mod_base = OTHER; note = 2'-O-(2-methoxyethyl) ribonucleotide
  modified_base 18: mod_base = OTHER; note = locked nucleic acid
  modified_base 19..23: mod_base = OTHER; note = 2'-O-(2-methoxyethyl) ribonucleotide
  modified_base 4: mod_base = OTHER; note = 5-methyl cytidine
  modified_base 18: mod_base = OTHER; note = 5-methyl cytidine
  modified_base 23: mod_base = OTHER; note = 5-methyl cytidine
ggacttgggagtggtgactgaac

SEQ ID NO: 246 - RNA, 23 nt, synthetic construct
  source 1..23: mol_type = other RNA
  modified_base 1..23: mod_base = OTHER; note = Phosphorothioate linkage
  modified_base 1..5: mod_base = OTHER; note = 2'-O-(2-methoxyethyl) ribonucleotide
  modified_base 6: mod_base = OTHER; note = locked nucleic acid
  modified_base 7..11: mod_base = OTHER; note = 2'-O-(2-methoxyethyl) ribonucleotide
  modified_base 12: mod_base = OTHER; note = locked nucleic acid
  modified_base 13..17: mod_base = OTHER; note = 2'-O-(2-methoxyethyl) ribonucleotide
  modified_base 18: mod_base = OTHER; note = locked nucleic acid
  modified_base 19..23: mod_base = OTHER; note = 2'-O-(2-methoxyethyl) ribonucleotide
  modified_base 4: mod_base = OTHER; note = 5-methyl cytidine
  modified_base 18: mod_base = OTHER; note = 5-methyl cytidine
  modified_base 23: mod_base = OTHER; note = 5-methyl cytidine
ggacttgggagtggtgactgaac

SEQ ID NO: 247 - RNA, 23 nt, synthetic construct
  source 1..23: mol_type = other RNA
  modified_base 1..23: mod_base = OTHER; note = Phosphorothioate linkage
  modified_base 1..3: mod_base = OTHER; note = 2'-O-(2-methoxyethyl) ribonucleotide
  modified_base 4: mod_base = OTHER; note = locked nucleic acid
  modified_base 5..7: mod_base = OTHER; note = 2'-O-(2-methoxyethyl) ribonucleotide
  modified_base 8: mod_base = OTHER; note = locked nucleic acid
  modified_base 9..11: mod_base = OTHER; note = 2'-O-(2-methoxyethyl) ribonucleotide
  modified_base 12: mod_base = OTHER; note = locked nucleic acid
  modified_base 13..15: mod_base = OTHER; note = 2'-O-(2-methoxyethyl) ribonucleotide
  modified_base 16: mod_base = OTHER; note = locked nucleic acid
  modified_base 17..19: mod_base = OTHER; note = 2'-O-(2-methoxyethyl) ribonucleotide
  modified_base 20: mod_base = OTHER; note = locked nucleic acid
  modified_base 21..23: mod_base = OTHER; note = 2'-O-(2-methoxyethyl) ribonucleotide
  modified_base 4: mod_base = OTHER; note = 5-methyl cytidine
  modified_base 18: mod_base = OTHER; note = 5-methyl cytidine
  modified_base 23: mod_base = OTHER; note = 5-methyl cytidine
ggacttgggagtggtgactgaac

SEQ ID NO: 248 - RNA, 23 nt, synthetic construct
  source 1..23: mol_type = other RNA
  modified_base 1..23: mod_base = OTHER; note = Phosphorothioate linkage
  modified_base 1..4: mod_base = OTHER; note = 2'-O-(2-methoxyethyl) ribonucleotide
  modified_base 5: mod_base = OTHER; note = locked nucleic acid
  modified_base 6..9: mod_base = OTHER; note = 2'-O-(2-methoxyethyl) ribonucleotide
  modified_base 10: mod_base = OTHER; note = locked nucleic acid
  modified_base 11..14: mod_base = OTHER; note = 2'-O-(2-methoxyethyl) ribonucleotide
  modified_base 15: mod_base = OTHER; note = locked nucleic acid
  modified_base 16..19: mod_base = OTHER; note = 2'-O-(2-methoxyethyl) ribonucleotide
  modified_base 20: mod_base = OTHER; note = locked nucleic acid
  modified_base 21..23: mod_base = OTHER; note = 2'-O-(2-methoxyethyl) ribonucleotide
  modified_base 4: mod_base = OTHER; note = 5-methyl cytidine
  modified_base 18: mod_base = OTHER; note = 5-methyl cytidine
  modified_base 23: mod_base = OTHER; note = 5-methyl cytidine
ggacttgggagtggtgactgaac

SEQ ID NO: 249 - RNA, 23 nt, synthetic construct
  source 1..23: mol_type = other RNA
  modified_base 1..23: mod_base = OTHER; note = Phosphorothioate linkage
  modified_base 1..3: mod_base = OTHER; note = 2'-O-(2-methoxyethyl) ribonucleotide
  modified_base 4: mod_base = OTHER; note = locked nucleic acid
  modified_base 5..8: mod_base = OTHER; note = 2'-O-(2-methoxyethyl) ribonucleotide
  modified_base 9: mod_base = OTHER; note = locked nucleic acid
  modified_base 10..13: mod_base = OTHER; note = 2'-O-(2-methoxyethyl) ribonucleotide
  modified_base 14: mod_base = OTHER; note = locked nucleic acid
  modified_base 15..18: mod_base = OTHER; note = 2'-O-(2-methoxyethyl) ribonucleotide
  modified_base 19: mod_base = OTHER; note = locked nucleic acid
  modified_base 20..23: mod_base = OTHER; note = 2'-O-(2-methoxyethyl) ribonucleotide
  modified_base 4: mod_base = OTHER; note = 5-methyl cytidine
  modified_base 18: mod_base = OTHER; note = 5-methyl cytidine
  modified_base 23: mod_base = OTHER; note = 5-methyl cytidine
ggacttgggagtggtgactgaac

SEQ ID NO: 250 - RNA, 24 nt, synthetic construct
  source 1..24: mol_type = other RNA
  modified_base 1..24: mod_base = OTHER; note = Phosphorothioate linkage
  modified_base 1..24: mod_base = OTHER; note = 2'-O-(2-methoxyethyl) ribonucleotide
  modified_base 5: mod_base = OTHER; note = 5-methyl cytidine
  modified_base 18: mod_base = OTHER; note = 5-methyl cytidine
  modified_base 24: mod_base = OTHER; note = 5-methyl cytidine
gggacttgggagtggtgactgaac

SEQ ID NO: 251 - RNA, 24 nt, synthetic construct
  source 1..24: mol_type = other RNA
  modified_base 1..24: mod_base = OTHER; note = Phosphorothioate linkage
  modified_base 1..24: mod_base = OTHER; note = 2'-O-(2-methoxyethyl) ribonucleotide
  modified_base 4: mod_base = OTHER; note = 5-methyl cytidine
  modified_base 17: mod_base = OTHER; note = 5-methyl cytidine
  modified_base 23..24: mod_base = OTHER; note = 5-methyl cytidine
ggacttgggagtggtgactgaacc

SEQ ID NO: 252 - RNA, 25 nt, synthetic construct
  source 1..25: mol_type = other RNA
  modified_base 1..25: mod_base = OTHER; note = Phosphorothioate linkage
  modified_base 1..25: mod_base = OTHER; note = 2'-O-(2-methoxyethyl) ribonucleotide
  modified_base 5: mod_base = OTHER; note = 5-methyl cytidine
  modified_base 18: mod_base = OTHER; note = 5-methyl cytidine
  modified_base 23..24: mod_base = OTHER; note = 5-methyl cytidine
gggacttgggagtggtgactgaacc

SEQ ID NO: 253 - RNA, 26 nt, synthetic construct
  source 1..26: mol_type = other RNA
  modified_base 1..26: mod_base = OTHER; note = Phosphorothioate linkage
  modified_base 1..26: mod_base = OTHER; note = 2'-O-(2-methoxyethyl) ribonucleotide
  modified_base 5: mod_base = OTHER; note = 5-methyl cytidine
  modified_base 18: mod_base = OTHER; note = 5-methyl cytidine
  modified_base 24..25: mod_base = OTHER; note = 5-methyl cytidine
gggacttgggagtggtgactgaacct

SEQ ID NO: 254 - RNA, 26 nt, synthetic construct
  source 1..26: mol_type = other RNA
  modified_base 1..26: mod_base = OTHER; note = Phosphorothioate linkage
  modified_base 1..26: mod_base = OTHER; note = 2'-O-(2-methoxyethyl) ribonucleotide
  modified_base 6: mod_base = OTHER; note = 5-methyl cytidine
  modified_base 19: mod_base = OTHER; note = 5-methyl cytidine
  modified_base 25..26: mod_base = OTHER; note = 5-methyl cytidine
agggacttgggagtggtgactgaacc

SEQ ID NO: 255 - RNA, 20 nt, synthetic construct
  source 1..20: mol_type = other RNA
  modified_base 1..20: mod_base = OTHER; note = Phosphorothioate linkage
  modified_base 1..20: mod_base = OTHER; note = 2'-O-methyl ribonucleotide
ggacttgggagtggtgactg

SEQ ID NO: 256 - RNA, 23 nt, synthetic construct
  source 1..23: mol_type = other RNA
  modified_base 1..23: mod_base = OTHER; note = Phosphorothioate linkage
  modified_base 1..23: mod_base = OTHER; note = 2'-O-methyl ribonucleotide
ggacttgggagtggtgactgaac

SEQ ID NO: 257 - RNA, 20 nt, synthetic construct
  source 1..20: mol_type = other RNA
  modified_base 1..20: mod_base = OTHER; note = Phosphorothioate linkage
  modified_base 1..20: mod_base = OTHER; note = 2'-O-methyl ribonucleotide
ggacttgggagtggtgactg

SEQ ID NO: 258 - RNA, 20 nt, synthetic construct
  source 1..20: mol_type = other RNA
  modified_base 1..20: mod_base = OTHER; note = Phosphorothioate linkage
  modified_base 1..20: mod_base = OTHER; note = 2'-O-methyl ribonucleotide
ggacttgggagtggtgactg

SEQ ID NO: 259 - RNA, 20 nt, synthetic construct
  source 1..20: mol_type = other RNA
  modified_base 1..20: mod_base = OTHER; note = Phosphorothioate linkage
  modified_base 1..20: mod_base = OTHER; note = 2'-O-methyl ribonucleotide
ggacttgggagtggtgactg

SEQ ID NO: 260 - RNA, 20 nt, synthetic construct
  source 1..20: mol_type = other RNA
  modified_base 1..20: mod_base = OTHER; note = Phosphorothioate linkage
  modified_base 1..20: mod_base = OTHER; note = 2'-O-methyl ribonucleotide
ggacttgggagtggtgactg

SEQ ID NO: 261 - RNA, 20 nt, synthetic construct
  source 1..20: mol_type = other RNA
  modified_base 1..20: mod_base = OTHER; note = Phosphorothioate linkage
  modified_base 1..20: mod_base = OTHER; note = 2'-O-methyl ribonucleotide
ggacttgggagtggtgactg

SEQ ID NO: 262 - RNA, 20 nt, synthetic construct
  source 1..20: mol_type = other RNA
  modified_base 1..20: mod_base = OTHER; note = Phosphorothioate linkage
  modified_base 1..20: mod_base = OTHER; note = 2'-O-(2-methoxyethyl) ribonucleotide
  modified_base 5: mod_base = OTHER; note = 5-methyl cytidine
  modified_base 9: mod_base = OTHER; note = 5-methyl cytidine
  modified_base 11: mod_base = OTHER; note = 5-methyl cytidine
  modified_base 13: mod_base = OTHER; note = 5-methyl cytidine
  modified_base 18..19: mod_base = OTHER; note = 5-methyl cytidine
aaaacaaacacacaagtccg

SEQ ID NO: 263 - RNA, 20 nt, synthetic construct
  source 1..20: mol_type = other RNA
  modified_base 1..20: mod_base = OTHER; note = Phosphorothioate linkage
  modified_base 1..20: mod_base = OTHER; note = 2'-O-(2-methoxyethyl) ribonucleotide
  modified_base 5: mod_base = OTHER; note = 5-methyl cytidine
  modified_base 8: mod_base = OTHER; note = 5-methyl cytidine
  modified_base 14: mod_base = OTHER; note = 5-methyl cytidine
  modified_base 17: mod_base = OTHER; note = 5-methyl cytidine
tgatcagcttgggcgactga

SEQ ID NO: 264 - RNA, 20 nt, synthetic construct
  source 1..20: mol_type = other RNA
  modified_base 1..20: mod_base = OTHER; note = Phosphorothioate linkage
  modified_base 1..20: mod_base = OTHER; note = 2'-O-(2-methoxyethyl) ribonucleotide
  modified_base 1: mod_base = OTHER; note = 5-methyl cytidine
  modified_base 8: mod_base = OTHER; note = 5-methyl cytidine
  modified_base 11: mod_base = OTHER; note = 5-methyl cytidine
  modified_base 17: mod_base = OTHER; note = 5-methyl cytidine
  modified_base 20: mod_base = OTHER; note = 5-methyl cytidine
ctatgatcagcttgggcgac

SEQ ID NO: 265 - DNA, 20 bp, synthetic construct
  source 1..20: mol_type = other DNA
  modified_base 1..20: mod_base = OTHER; note = Phosphorothioate linkage
  modified_base 1..5: mod_base = OTHER; note = 2'-O-(2-methoxyethyl) ribonucleotide
  misc_feature 5..15: note = DNA
  modified_base 16..20: mod_base = OTHER; note = 2'-O-(2-methoxyethyl) ribonucleotide
  modified_base 10: mod_base = OTHER; note = 5-methyl cytidine
  modified_base 12: mod_base = OTHER; note = 5-methyl cytidine
taggagaatcgctttgggag

SEQ ID NO: 266 - RNA, 20 nt, synthetic construct
  source 1..20: mol_type = other RNA
  modified_base 1..20: mod_base = OTHER; note = Phosphorothioate linkage
  modified_base 1..20: mod_base = OTHER; note = 2'-O-(2-methoxyethyl) ribonucleotide
  modified_base 11: mod_base = OTHER; note = 5-methyl cytidine
  modified_base 13: mod_base = OTHER; note = 5-methyl cytidine
gtaggagaatcgctttggga

SEQ ID NO: 267 - RNA, 20 nt, synthetic construct
  source 1..20: mol_type = other RNA
  modified_base 1..20: mod_base = OTHER; note = Phosphorothioate linkage
  modified_base 1..20: mod_base = OTHER; note = 2'-O-(2-methoxyethyl) ribonucleotide
  modified_base 1: mod_base = OTHER; note = 5-methyl cytidine
  modified_base 13: mod_base = OTHER; note = 5-methyl cytidine
  modified_base 15: mod_base = OTHER; note = 5-methyl cytidine
cggtaggagaatcgctttgg

SEQ ID NO: 268 - RNA, 20 nt, synthetic construct
  source 1..20: mol_type = other RNA
  modified_base 1..20: mod_base = OTHER; note = Phosphorothioate linkage
  modified_base 1..20: mod_base = OTHER; note = 2'-O-(2-methoxyethyl) ribonucleotide
  modified_base 2: mod_base = OTHER; note = 5-methyl cytidine
  modified_base 6..7: mod_base = OTHER; note = 5-methyl cytidine
  modified_base 10: mod_base = OTHER; note = 5-methyl cytidine
  modified_base 12: mod_base = OTHER; note = 5-methyl cytidine
  modified_base 18: mod_base = OTHER; note = 5-methyl cytidine
  modified_base 20: mod_base = OTHER; note = 5-methyl cytidine
gcgagccagctcagtagctc

SEQ ID NO: 269 - RNA, 20 nt, synthetic construct
  source 1..20: mol_type = other RNA
  modified_base 1..20: mod_base = OTHER; note = Phosphorothioate linkage
  modified_base 1..20: mod_base = OTHER; note = 2'-O-(2-methoxyethyl) ribonucleotide
  modified_base 2: mod_base = OTHER; note = 5-methyl cytidine
  modified_base 7: mod_base = OTHER; note = 5-methyl cytidine
  modified_base 9..10: mod_base = OTHER; note = 5-methyl cytidine
  modified_base 13: mod_base = OTHER; note = 5-methyl cytidine
  modified_base 15: mod_base = OTHER; note = 5-methyl cytidine
  modified_base 18: mod_base = OTHER; note = 5-methyl cytidine
  modified_base 20: mod_base = OTHER; note = 5-methyl cytidine
tcgaatctccggctcttcac

SEQ ID NO: 270 - RNA, 20 nt, synthetic construct
  source 1..20: mol_type = other RNA
  modified_base 1..20: mod_base = OTHER; note = Phosphorothioate linkage
  modified_base 1..20: mod_base = OTHER; note = 2'-O-(2-methoxyethyl) ribonucleotide
  modified_base 4: mod_base = OTHER; note = 5-methyl cytidine
  modified_base 8: mod_base = OTHER; note = 5-methyl cytidine
  modified_base 14: mod_base = OTHER; note = 5-methyl cytidine
tgacaagcgggatcggagag

SEQ ID NO: 271 - RNA, 20 nt, synthetic construct
  source 1..20: mol_type = other RNA
  modified_base 1..20: mod_base = OTHER; note = Phosphorothioate linkage
  modified_base 1..20: mod_base = OTHER; note = 2'-O-(2-methoxyethyl) ribonucleotide
  modified_base 3: mod_base = OTHER; note = 5-methyl cytidine
  modified_base 8: mod_base = OTHER; note = 5-methyl cytidine
  modified_base 10: mod_base = OTHER; note = 5-methyl cytidine
ttctaaacgcgaagtgggtg

SEQ ID NO: 272 - RNA, 20 nt, synthetic construct
  source 1..20: mol_type = other RNA
  modified_base 1..20: mod_base = OTHER; note = Phosphorothioate linkage
  modified_base 1..20: mod_base = OTHER; note = 2'-O-(2-methoxyethyl) ribonucleotide
  modified_base 2: mod_base = OTHER; note = 5-methyl cytidine
  modified_base 9: mod_base = OTHER; note = 5-methyl cytidine
  modified_base 11: mod_base = OTHER; note = 5-methyl cytidine
  modified_base 20: mod_base = OTHER; note = 5-methyl cytidine
gctggtttctctgttaggac

SEQ ID NO: 273 - RNA, 20 nt, synthetic construct
  source 1..20: mol_type = other RNA
  modified_base 1..20: mod_base = OTHER; note = Phosphorothioate linkage
  modified_base 1..20: mod_base = OTHER; note = 2'-O-(2-methoxyethyl) ribonucleotide
  modified_base 1: mod_base = OTHER; note = 5-methyl cytidine
  modified_base 3: mod_base = OTHER; note = 5-methyl cytidine
  modified_base 7: mod_base = OTHER; note = 5-methyl cytidine
  modified_base 16..18: mod_base = OTHER; note = 5-methyl cytidine
cgcaggctaggagtacccat

SEQ ID NO: 274 - RNA, 20 nt, synthetic construct
  source 1..20: mol_type = other RNA
  modified_base 1..20: mod_base = OTHER; note = Phosphorothioate linkage
  modified_base 1..20: mod_base = OTHER; note = 2'-O-(2-methoxyethyl) ribonucleotide
  modified_base 3: mod_base = OTHER; note = 5-methyl cytidine
  modified_base 9: mod_base = OTHER; note = 5-methyl cytidine
  modified_base 14..15: mod_base = OTHER; note = 5-methyl cytidine
  modified_base 18..20: mod_base = OTHER; note = 5-methyl cytidine
gtcaaagtcgaggcctaccc

SEQ ID NO: 275 - RNA, 20 nt, synthetic construct
  source 1..20: mol_type = other RNA
  modified_base 1..20: mod_base = OTHER; note = Phosphorothioate linkage
  modified_base 1..20: mod_base = OTHER; note = 2'-O-(2-methoxyethyl) ribonucleotide
  modified_base 10..13: mod_base = OTHER; note = 5-methyl cytidine
  modified_base 15: mod_base = OTHER; note = 5-methyl cytidine
gatagttggcccctcggagt

SEQ ID NO: 276 - RNA, 20 nt, synthetic construct
  source 1..20: mol_type = other RNA
  modified_base 1..20: mod_base = OTHER; note = Phosphorothioate linkage
  modified_base 1..20: mod_base = OTHER; note = 2'-O-(2-methoxyethyl) ribonucleotide
  modified_base 4: mod_base = OTHER; note = 5-methyl cytidine
  modified_base 6: mod_base = OTHER; note = 5-methyl cytidine
  modified_base 13: mod_base = OTHER; note = 5-methyl cytidine
  modified_base 15: mod_base = OTHER; note = 5-methyl cytidine
  modified_base 17: mod_base = OTHER; note = 5-methyl cytidine
  modified_base 19..20: mod_base = OTHER; note = 5-methyl cytidine
ggtcacagattgcactctcc

SEQ ID NO: 277 - RNA, 20 nt, synthetic construct
  source 1..20: mol_type = other RNA
  modified_base 1..20: mod_base = OTHER; note = Phosphorothioate linkage
  modified_base 1..20: mod_base = OTHER; note = 2'-O-(2-methoxyethyl) ribonucleotide
  modified_base 6..8: mod_base = OTHER; note = 5-methyl cytidine
  modified_base 11: mod_base = OTHER; note = 5-methyl cytidine
  modified_base 13..16: mod_base = OTHER; note = 5-methyl cytidine
ttttgcccagcgccccttta

SEQ ID NO: 278 - RNA, 20 nt, synthetic construct
  source 1..20: mol_type = other RNA
  modified_base 1..20: mod_base = OTHER; note = Phosphorothioate linkage
  modified_base 1..20: mod_base = OTHER; note = 2'-O-(2-methoxyethyl) ribonucleotide
  modified_base 7: mod_base = OTHER; note = 5-methyl cytidine
  modified_base 9..10: mod_base = OTHER; note = 5-methyl cytidine
  modified_base 13: mod_base = OTHER; note = 5-methyl cytidine
  modified_base 15: mod_base = OTHER; note = 5-methyl cytidine
  modified_base 17: mod_base = OTHER; note = 5-methyl cytidine
aaaggacgccttctctcggg

SEQ ID NO: 279 - RNA, 20 nt, synthetic construct
  source 1..20: mol_type = other RNA
  modified_base 1..20: mod_base = OTHER; note = Phosphorothioate linkage
  modified_base 1..20: mod_base = OTHER; note = 2'-O-(2-methoxyethyl) ribonucleotide
  modified_base 3..5: mod_base = OTHER; note = 5-methyl cytidine
  modified_base 8..9: mod_base = OTHER; note = 5-methyl cytidine
  modified_base 14: mod_base = OTHER; note = 5-methyl cytidine
agcccgaccttgactgatag

SEQ ID NO: 280 - RNA, 20 nt, synthetic construct
  source 1..20: mol_type = other RNA
  modified_base 1..20: mod_base = OTHER; note = Phosphorothioate linkage
  modified_base 1..20: mod_base = OTHER; note = 2'-O-(2-methoxyethyl) ribonucleotide
  modified_base 1: mod_base = OTHER; note = 5-methyl cytidine
  modified_base 4: mod_base = OTHER; note = 5-methyl cytidine
  modified_base 8: mod_base = OTHER; note = 5-methyl cytidine
  modified_base 12: mod_base = OTHER; note = 5-methyl cytidine
  modified_base 18: mod_base = OTHER; note = 5-methyl cytidine
caactatcagtcaaggtcgg

SEQ ID NO: 281 - RNA, 20 nt, synthetic construct
  source 1..20: mol_type = other RNA
  modified_base 1..20: mod_base = OTHER; note = Phosphorothioate linkage
  modified_base 1..20: mod_base = OTHER; note = 2'-O-(2-methoxyethyl) ribonucleotide
  modified_base 4: mod_base = OTHER; note = 5-methyl cytidine
  modified_base 7..8: mod_base = OTHER; note = 5-methyl cytidine
  modified_base 12..13: mod_base = OTHER; note = 5-methyl cytidine
  modified_base 17..19: mod_base = OTHER; note = 5-methyl cytidine
aggcgtcctttccattccct

SEQ ID NO: 282 - RNA, 20 nt, synthetic construct
  source 1..20: mol_type = other RNA
  modified_base 1..20: mod_base = OTHER; note = Phosphorothioate linkage
  modified_base 1..20: mod_base = OTHER; note = 2'-O-(2-methoxyethyl) ribonucleotide
  modified_base 4: mod_base = OTHER; note = 5-methyl cytidine
  modified_base 8: mod_base = OTHER; note = 5-methyl cytidine
  modified_base 14..15: mod_base = OTHER; note = 5-methyl cytidine
gtgcaatctgtgacctgtaa

SEQ ID NO: 283 - RNA, 20 nt, synthetic construct
  source 1..20: mol_type = other RNA
  modified_base 1..20: mod_base = OTHER; note = Phosphorothioate linkage
  modified_base 1..20: mod_base = OTHER; note = 2'-O-(2-methoxyethyl) ribonucleotide
  modified_base 3..4: mod_base = OTHER; note = 5-methyl cytidine
  modified_base 7: mod_base = OTHER; note = 5-methyl cytidine
  modified_base 11: mod_base = OTHER; note = 5-methyl cytidine
  modified_base 14: mod_base = OTHER; note = 5-methyl cytidine
  modified_base 18..20: mod_base = OTHER; note = 5-methyl cytidine
ggccaactatcagctttccc

SEQ ID NO: 284 - RNA, 20 nt, synthetic construct
  source 1..20: mol_type = other RNA
  modified_base 1..20: mod_base = OTHER; note = Phosphorothioate linkage
  modified_base 1..20: mod_base = OTHER; note = 2'-O-(2-methoxyethyl) ribonucleotide
  modified_base 5: mod_base = OTHER; note = 5-methyl cytidine
  modified_base 7: mod_base = OTHER; note = 5-methyl cytidine
  modified_base 13: mod_base = OTHER; note = 5-methyl cytidine
  modified_base 15..16: mod_base = OTHER; note = 5-methyl cytidine
ttagcacgtggactccgagg

SEQ ID NO: 285 - RNA, 20 nt, synthetic construct
  source 1..20: mol_type = other RNA
  modified_base 1..20: mod_base = OTHER; note = Phosphorothioate linkage
  modified_base 1..20: mod_base = OTHER; note = 2'-O-(2-methoxyethyl) ribonucleotide
  modified_base 6..7: mod_base = OTHER; note = 5-methyl cytidine
  modified_base 9: mod_base = OTHER; note = 5-methyl cytidine
  modified_base 12: mod_base = OTHER; note = 5-methyl cytidine
  modified_base 18: mod_base = OTHER; note = 5-methyl cytidine
gtaggcctcgactttgacgt

SEQ ID NO: 286 - RNA, 20 nt, synthetic construct
  source 1..20: mol_type = other RNA
  modified_base 1..20: mod_base = OTHER; note = Phosphorothioate linkage
  modified_base 1..20: mod_base = OTHER; note = 2'-O-(2-methoxyethyl) ribonucleotide
  modified_base 3: mod_base = OTHER; note = 5-methyl cytidine
  modified_base 5..6: mod_base = OTHER; note = 5-methyl cytidine
  modified_base 10..11: mod_base = OTHER; note = 5-methyl cytidine
  modified_base 14: mod_base = OTHER; note = 5-methyl cytidine
  modified_base 16..17: mod_base = OTHER; note = 5-methyl cytidine
tactcctagcctgcgccttt

SEQ ID NO: 287 - RNA, 20 nt, synthetic construct
  source 1..20: mol_type = other RNA
  modified_base 1..20: mod_base = OTHER; note = Phosphorothioate linkage
  modified_base 1..20: mod_base = OTHER; note = 2'-O-(2-methoxyethyl) ribonucleotide
  modified_base 1..2: mod_base = OTHER; note = 5-methyl cytidine
  modified_base 4: mod_base = OTHER; note = 5-methyl cytidine
  modified_base 7: mod_base = OTHER; note = 5-methyl cytidine
  modified_base 9: mod_base = OTHER; note = 5-methyl cytidine
  modified_base 18: mod_base = OTHER; note = 5-methyl cytidine
ccacttcgcgtttagaactt

SEQ ID NO: 288 - RNA, 20 nt, synthetic construct
  source 1..20: mol_type = other RNA
  modified_base 1..20: mod_base = OTHER; note = Phosphorothioate linkage
  modified_base 1..20: mod_base = OTHER; note = 2'-O-(2-methoxyethyl) ribonucleotide
  modified_base 2: mod_base = OTHER; note = 5-methyl cytidine
  modified_base 4..5: mod_base = OTHER; note = 5-methyl cytidine
  modified_base 9..11: mod_base = OTHER; note = 5-methyl cytidine
  modified_base 13: mod_base = OTHER; note = 5-methyl cytidine
  modified_base 18: mod_base = OTHER; note = 5-methyl cytidine
tctccgatcccgcttgtcag

SEQ ID NO: 289 - RNA, 20 nt, synthetic construct
  source 1..20: mol_type = other RNA
  modified_base 1..20: mod_base = OTHER; note = Phosphorothioate linkage
  modified_base 1..20: mod_base = OTHER; note = 2'-O-(2-methoxyethyl) ribonucleotide
  modified_base 1: mod_base = OTHER; note = 5-methyl cytidine
  modified_base 8: mod_base = OTHER; note = 5-methyl cytidine
  modified_base 16: mod_base = OTHER; note = 5-methyl cytidine
cgggagacaggaaggcttaa

SEQ ID NO: 290 - RNA, 20 nt, synthetic construct
  source 1..20: mol_type = other RNA
  modified_base 1..20: mod_base = OTHER; note = Phosphorothioate linkage
  modified_base 1..20: mod_base = OTHER; note = 2'-O-(2-methoxyethyl) ribonucleotide
  modified_base 2: mod_base = OTHER; note = 5-methyl cytidine
  modified_base 11..12: mod_base = OTHER; note = 5-methyl cytidine
  modified_base 20: mod_base = OTHER; note = 5-methyl cytidine
acgtgaagagccggagattc

SEQ ID NO: 291 - RNA, 20 nt, synthetic construct
  source 1..20: mol_type = other RNA
  modified_base 1..20: mod_base = OTHER; note = Phosphorothioate linkage
  modified_base 1..20: mod_base = OTHER; note = 2'-O-(2-methoxyethyl) ribonucleotide
  modified_base 14..17: mod_base = OTHER; note = 5-methyl cytidine
aagaaatagattaccccgtt

SEQ ID NO: 292 - RNA, 20 nt, synthetic construct
  source 1..20: mol_type = other RNA
  modified_base 1..20: mod_base = OTHER; note = Phosphorothioate linkage
  modified_base 1..20: mod_base = OTHER; note = 2'-O-(2-methoxyethyl) ribonucleotide
  modified_base 5: mod_base = OTHER; note = 5-methyl cytidine
  modified_base 7: mod_base = OTHER; note = 5-methyl cytidine
  modified_base 10..11: mod_base = OTHER; note = 5-methyl cytidine
  modified_base 14..16: mod_base = OTHER; note = 5-methyl cytidine
  modified_base 18..19: mod_base = OTHER; note = 5-methyl cytidine
tagacacttccagcccacct

SEQ ID NO: 293 - RNA, 20 nt, synthetic construct
  source 1..20: mol_type = other RNA
  modified_base 1..20: mod_base = OTHER; note = Phosphorothioate linkage
  modified_base 1..20: mod_base = OTHER; note = 2'-O-(2-methoxyethyl) ribonucleotide
  modified_base 1..2: mod_base = OTHER; note = 5-methyl cytidine
  modified_base 10..11: mod_base = OTHER; note = 5-methyl cytidine
  modified_base 19..20: mod_base = OTHER; note = 5-methyl cytidine
ccaataaagccttgggtgcc

SEQ ID NO: 294 - RNA, 20 nt, synthetic construct
  source 1..20: mol_type = other RNA
  modified_base 1..20: mod_base = OTHER; note = Phosphorothioate linkage
  modified_base 1..20: mod_base = OTHER; note = 2'-O-(2-methoxyethyl) ribonucleotide
  modified_base 4: mod_base = OTHER; note = 5-methyl cytidine
  modified_base 8: mod_base = OTHER; note = 5-methyl cytidine
  modified_base 17: mod_base = OTHER; note = 5-methyl cytidine
ggacatgctggaaagtctta

SEQ ID NO: 295 - RNA, 20 nt, synthetic construct
  source 1..20: mol_type = other RNA
  modified_base 1..20: mod_base = OTHER; note = Phosphorothioate linkage
  modified_base 1..20: mod_base = OTHER; note = 2'-O-(2-methoxyethyl) ribonucleotide
  modified_base 8..9: mod_base = OTHER; note = 5-methyl cytidine
  modified_base 11: mod_base = OTHER; note = 5-methyl cytidine
  modified_base 13: mod_base = OTHER; note = 5-methyl cytidine
  modified_base 17..19: mod_base = OTHER; note = 5-methyl cytidine
tattaatccacgctgtccca

SEQ ID NO: 296 - RNA, 20 nt, synthetic construct
  source 1..20: mol_type = other RNA
  modified_base 1..20: mod_base = OTHER; note = Phosphorothioate linkage
  modified_base 1..20: mod_base = OTHER; note = 2'-O-(2-methoxyethyl) ribonucleotide
  modified_base 5: mod_base = OTHER; note = 5-methyl cytidine
  modified_base 11: mod_base = OTHER; note = 5-methyl cytidine
  modified_base 14..15: mod_base = OTHER; note = 5-methyl cytidine
  modified_base 18..19: mod_base = OTHER; note = 5-methyl cytidine
atggctaaaactaccttcca

SEQ ID NO: 297 - RNA, 20 nt, synthetic construct
  source 1..20: mol_type = other RNA
  modified_base 1..20: mod_base = OTHER; note = Phosphorothioate linkage
  modified_base 1..20: mod_base = OTHER; note = 2'-O-(2-methoxyethyl) ribonucleotide
  modified_base 3: mod_base = OTHER; note = 5-methyl cytidine
  modified_base 14: mod_base = OTHER; note = 5-methyl cytidine
atcaagggtttggcgtttag

SEQ ID NO: 298 - RNA, 20 nt, synthetic construct
  source 1..20: mol_type = other RNA
  modified_base 1..20: mod_base = OTHER; note = Phosphorothioate linkage
  modified_base 1..20: mod_base = OTHER; note = 2'-O-(2-methoxyethyl) ribonucleotide
  modified_base 4: mod_base = OTHER; note = 5-methyl cytidine
  modified_base 13: mod_base = OTHER; note = 5-methyl cytidine
  modified_base 15: mod_base = OTHER; note = 5-methyl cytidine
tgactagagaaacgcttaga

SEQ ID NO: 299 - RNA, 20 nt, synthetic construct
  source 1..20: mol_type = other RNA
  modified_base 1..20: mod_base = OTHER; note = Phosphorothioate linkage
  modified_base 1..20: mod_base = OTHER; note = 2'-O-(2-methoxyethyl) ribonucleotide
  modified_base 1: mod_base = OTHER; note = 5-methyl cytidine
  modified_base 6: mod_base = OTHER; note = 5-methyl cytidine
  modified_base 8: mod_base = OTHER; note = 5-methyl cytidine
  modified_base 10: mod_base = OTHER; note = 5-methyl cytidine
  modified_base 20: mod_base = OTHER; note = 5-methyl cytidine
catttcacacttgtatgagc

SEQ ID NO: 300 - RNA, 20 nt, synthetic construct
  source 1..20: mol_type = other RNA
  modified_base 1..20: mod_base = OTHER; note = Phosphorothioate linkage
  modified_base 1..20: mod_base = OTHER; note = 2'-O-(2-methoxyethyl) ribonucleotide
  modified_base 8..9: mod_base = OTHER; note = 5-methyl cytidine
  modified_base 13: mod_base = OTHER; note = 5-methyl cytidine
  modified_base 19..20: mod_base = OTHER; note = 5-methyl cytidine
aagaaggccaagctggtacc

SEQ ID NO: 301 - RNA, 20 nt, synthetic construct
  source 1..20: mol_type = other RNA
  modified_base 1..20: mod_base = OTHER; note = Phosphorothioate linkage
  modified_base 1..20: mod_base = OTHER; note = 2'-O-(2-methoxyethyl) ribonucleotide
  modified_base 12: mod_base = OTHER; note = 5-methyl cytidine
  modified_base 14: mod_base = OTHER; note = 5-methyl cytidine
  modified_base 18: mod_base = OTHER; note = 5-methyl cytidine
ggagatagggtcacgtactt

SEQ ID NO: 302 - RNA, 20 nt, synthetic construct
  source 1..20: mol_type = other RNA
  modified_base 1..20: mod_base = OTHER; note = Phosphorothioate linkage
  modified_base 1..20: mod_base = OTHER; note = 2'-O-(2-methoxyethyl) ribonucleotide
  modified_base 7: mod_base = OTHER; note = 5-methyl cytidine
  modified_base 16..20: mod_base = OTHER; note = 5-methyl cytidine
ataggtcagggaatgccgcc

SEQ ID NO: 303 - RNA, 20 nt, synthetic construct
  source 1..20: mol_type = other RNA
  modified_base 1..20: mod_base = OTHER; note = Phosphorothioate linkage
  modified_base 1..20: mod_base = OTHER; note = 2'-O-(2-methoxyethyl) ribonucleotide
  modified_base 13: mod_base = OTHER; note = 5-methyl cytidine
  modified_base 16: mod_base = OTHER; note = 5-methyl cytidine
  modified_base 19..20: mod_base = OTHER; note = 5-methyl cytidine
tgatatagagatctgcagcc

SEQ ID NO: 304 - RNA, 20 nt, synthetic construct
  source 1..20: mol_type = other RNA
  modified_base 1..20: mod_base = OTHER; note = Phosphorothioate linkage
  modified_base 1..20: mod_base = OTHER; note = 2'-O-(2-methoxyethyl) ribonucleotide
  modified_base 3..4: mod_base = OTHER; note = 5-methyl cytidine
  modified_base 7: mod_base = OTHER; note = 5-methyl cytidine
  modified_base 9: mod_base = OTHER; note = 5-methyl cytidine
  modified_base 11: mod_base = OTHER; note = 5-methyl cytidine
  modified_base 13: mod_base = OTHER; note = 5-methyl cytidine
  modified_base 15: mod_base = OTHER; note = 5-methyl cytidine
  modified_base 18: mod_base = OTHER; note = 5-methyl cytidine
  modified_base 20: mod_base = OTHER; note = 5-methyl cytidine
gtccagcacgctctcagcac

SEQ ID NO: 305 - RNA, 20 nt, synthetic construct
  source 1..20: mol_type = other RNA
  modified_base 1..20: mod_base = OTHER; note = Phosphorothioate linkage
  modified_base 1..20: mod_base = OTHER; note = 2'-O-(2-methoxyethyl) ribonucleotide
  modified_base 1: mod_base = OTHER; note = 5-methyl cytidine
  modified_base 3: mod_base = OTHER; note = 5-methyl cytidine
  modified_base 6: mod_base = OTHER; note = 5-methyl cytidine
  modified_base 16: mod_base = OTHER; note = 5-methyl cytidine
cgctgctgtttggaacgagt

SEQ ID NO: 306 - RNA, 20 nt, synthetic construct
  source 1..20: mol_type = other RNA
  modified_base 1..20: mod_base = OTHER; note = Phosphorothioate linkage
  modified_base 1..20: mod_base = OTHER; note = 2'-O-(2-methoxyethyl) ribonucleotide
  modified_base 2: mod_base = OTHER; note = 5-methyl cytidine
  modified_base 8..9: mod_base = OTHER; note = 5-methyl cytidine
  modified_base 11: mod_base = OTHER; note = 5-methyl cytidine
  modified_base 20: mod_base = OTHER; note = 5-methyl cytidine
acagtggccgcataaatttc

SEQ ID NO: 307 - RNA, 20 nt, synthetic construct
  source 1..20: mol_type = other RNA
  modified_base 1..20: mod_base = OTHER; note = Phosphorothioate linkage
  modified_base 1..20: mod_base = OTHER; note = 2'-O-(2-methoxyethyl) ribonucleotide
  modified_base 1..2: mod_base = OTHER; note = 5-methyl cytidine
  modified_base 6..7: mod_base = OTHER; note = 5-methyl cytidine
  modified_base 10..11: mod_base = OTHER; note = 5-methyl cytidine
  modified_base 14: mod_base = OTHER; note = 5-methyl cytidine
  modified_base 18: mod_base = OTHER; note = 5-methyl cytidine
cctgacctgccatctatcaa

SEQ ID NO: 308 - RNA, 20 nt, synthetic construct
  source 1..20: mol_type = other RNA
  modified_base 1..20: mod_base = OTHER; note = Phosphorothioate linkage
  modified_base 1..20: mod_base = OTHER; note = 2'-O-(2-methoxyethyl) ribonucleotide
  modified_base 3: mod_base = OTHER; note = 5-methyl cytidine
  modified_base 7: mod_base = OTHER; note = 5-methyl cytidine
  modified_base 11..12: mod_base = OTHER; note = 5-methyl cytidine
  modified_base 15: mod_base = OTHER; note = 5-methyl cytidine
  modified_base 17..18: mod_base = OTHER; note = 5-methyl cytidine
gtcagactgtcctacacctt

SEQ ID NO: 309 - RNA, 20 nt, synthetic construct
  source 1..20: mol_type = other RNA
  modified_base 1..20: mod_base = OTHER; note = Phosphorothioate linkage
  modified_base 1..20: mod_base = OTHER; note = 2'-O-(2-methoxyethyl) ribonucleotide
  modified_base 2: mod_base = OTHER; note = 5-methyl cytidine
  modified_base 18..20: mod_base = OTHER; note = 5-methyl cytidine
tcttgttgttggaaattccc

SEQ ID NO: 310 - RNA, 20 nt, synthetic construct
  source 1..20: mol_type = other RNA
  modified_base 1..20: mod_base = OTHER; note = Phosphorothioate linkage
  modified_base 1..20: mod_base = OTHER; note = 2'-O-(2-methoxyethyl) ribonucleotide
  modified_base 1..2: mod_base = OTHER; note = 5-methyl cytidine
  modified_base 4: mod_base = OTHER; note = 5-methyl cytidine
  modified_base 18..20: mod_base = OTHER; note = 5-methyl cytidine
cctcatgtatgtaattgccc

SEQ ID NO: 311 - RNA, 20 nt, synthetic construct
  source 1..20: mol_type = other RNA
  modified_base 1..20: mod_base = OTHER; note = Phosphorothioate linkage
  modified_base 1..20: mod_base = OTHER; note = 2'-O-(2-methoxyethyl) ribonucleotide
  modified_base 2: mod_base = OTHER; note = 5-methyl cytidine
  modified_base 4: mod_base = OTHER; note = 5-methyl cytidine
  modified_base 9: mod_base = OTHER; note = 5-methyl cytidine
  modified_base 14: mod_base = OTHER; note = 5-methyl cytidine
actcaatgcatagcagaata

SEQ ID NO: 312 - RNA, 20 nt, synthetic construct
  source 1..20: mol_type = other RNA
  modified_base 1..20: mod_base = OTHER; note = Phosphorothioate linkage
  modified_base 1..20: mod_base = OTHER; note = 2'-O-(2-methoxyethyl) ribonucleotide
  modified_base 2..3: mod_base = OTHER; note = 5-methyl cytidine
  modified_base 7: mod_base = OTHER; note = 5-methyl cytidine
  modified_base 10: mod_base = OTHER; note = 5-methyl cytidine
  modified_base 13: mod_base = OTHER; note = 5-methyl cytidine
tccatacaactgcagagtgg

SEQ ID NO: 313 - RNA, 20 nt, synthetic construct
  source 1..20: mol_type = other RNA
  modified_base 1..20: mod_base = OTHER; note = Phosphorothioate linkage
  modified_base 1..20: mod_base = OTHER; note = 2'-O-(2-methoxyethyl) ribonucleotide
  modified_base 5: mod_base = OTHER; note = 5-methyl cytidine
  modified_base 12..13: mod_base = OTHER; note = 5-methyl cytidine
  modified_base 16: mod_base = OTHER; note = 5-methyl cytidine
atggcaaatgaccttcggta

SEQ ID NO: 314 - RNA, 20 nt, synthetic construct
  source 1..20: mol_type = other RNA
  modified_base 1..20: mod_base = OTHER; note = Phosphorothioate linkage
  modified_base 1..20: mod_base = OTHER; note = 2'-O-(2-methoxyethyl) ribonucleotide
  modified_base 3: mod_base = OTHER; note = 5-methyl cytidine
  modified_base 6: mod_base = OTHER; note = 5-methyl cytidine
  modified_base 12: mod_base = OTHER; note = 5-methyl cytidine
  modified_base 17..18: mod_base = OTHER; note = 5-methyl cytidine
gtcttcaagaactttaccga

SEQ ID NO: 315 - RNA, 20 nt, synthetic construct
  source 1..20: mol_type = other RNA
  modified_base 1..20: mod_base = OTHER; note = Phosphorothioate linkage
  modified_base 1..20: mod_base = OTHER; note = 2'-O-(2-methoxyethyl) ribonucleotide
  modified_base 2..3: mod_base = OTHER; note = 5-methyl cytidine
  modified_base 5: mod_base = OTHER; note = 5-methyl cytidine
  modified_base 7: mod_base = OTHER; note = 5-methyl cytidine
  modified_base 10: mod_base = OTHER; note = 5-methyl cytidine
accactctgcagttgtatgg

SEQ ID NO: 316 - RNA, 20 nt, synthetic construct
  source 1..20: mol_type = other RNA
  modified_base 1..20: mod_base = OTHER; note = Phosphorothioate linkage
  modified_base 1..20: mod_base = OTHER; note = 2'-O-(2-methoxyethyl) ribonucleotide
  modified_base 3: mod_base = OTHER; note = 5-methyl cytidine
  modified_base 8: mod_base = OTHER; note = 5-methyl cytidine
  modified_base 19..20: mod_base = OTHER; note = 5-methyl cytidine
tgctatgcattgagttttcc

SEQ ID NO: 317 - RNA, 20 nt, synthetic construct
  source 1..20: mol_type = other RNA
  modified_base 1..20: mod_base = OTHER; note = Phosphorothioate linkage
  modified_base 1..20: mod_base = OTHER; note = 2'-O-(2-methoxyethyl) ribonucleotide
  modified_base 2..3: mod_base = OTHER; note = 5-methyl cytidine
  modified_base 5: mod_base = OTHER; note = 5-methyl cytidine
  modified_base 8..9: mod_base = OTHER; note = 5-methyl cytidine
  modified_base 13: mod_base = OTHER; note = 5-methyl cytidine
  modified_base 19: mod_base = OTHER; note = 5-methyl cytidine
tcctctgcctgactaattcg

SEQ ID NO: 318 - RNA, 20 nt, synthetic construct
  source 1..20: mol_type = other RNA
  modified_base 1..20: mod_base = OTHER; note = Phosphorothioate linkage
  modified_base 1..20: mod_base = OTHER; note = 2'-O-(2-methoxyethyl) ribonucleotide
  modified_base 5..7: mod_base = OTHER; note = 5-methyl cytidine
  modified_base 13..15: mod_base = OTHER; note = 5-methyl cytidine
  modified_base 17: mod_base = OTHER; note = 5-methyl cytidine
  modified_base 19..20: mod_base = OTHER; note = 5-methyl cytidine
tttacccatatacccacacc

SEQ ID NO: 319 - RNA, 20 nt, synthetic construct
  source 1..20: mol_type = other RNA
  modified_base 1..20: mod_base = OTHER; note = Phosphorothioate linkage
  modified_base 1..20: mod_base = OTHER; note = 2'-O-(2-methoxyethyl) ribonucleotide
  modified_base 6: mod_base = OTHER; note = 5-methyl cytidine
  modified_base 11: mod_base = OTHER; note = 5-methyl cytidine
  modified_base 13: mod_base = OTHER; note = 5-methyl cytidine
  modified_base 17..18: mod_base = OTHER; note = 5-methyl cytidine
gtttgcaattctcagacctg

SEQ ID NO: 320 - RNA, 20 nt, synthetic construct
  source 1..20: mol_type = other RNA
  modified_base 1..20: mod_base = OTHER; note = Phosphorothioate linkage
  modified_base 1..20: mod_base = OTHER; note = 2'-O-(2-methoxyethyl) ribonucleotide
  modified_base 3: mod_base = OTHER; note = 5-methyl cytidine
  modified_base 9: mod_base = OTHER; note = 5-methyl cytidine
  modified_base 13: mod_base = OTHER; note = 5-methyl cytidine
ggcaattacatacatgagga

SEQ ID NO: 321 - RNA, 20 nt, synthetic construct
  source 1..20: mol_type = other RNA
  modified_base 1..20: mod_base = OTHER; note = Phosphorothioate linkage
  modified_base 1..20: mod_base = OTHER; note = 2'-O-(2-methoxyethyl) ribonucleotide
  modified_base 13: mod_base = OTHER; note = 5-methyl cytidine
  modified_base 17: mod_base = OTHER; note = 5-methyl cytidine
taaggtgtaggacagtctga

SEQ ID NO: 322 - RNA, 20 nt, synthetic construct
  source 1..20: mol_type = other RNA
  modified_base 1..20: mod_base = OTHER; note = Phosphorothioate linkage
  modified_base 1..20: mod_base = OTHER; note = 2'-O-(2-methoxyethyl) ribonucleotide
  modified_base 12: mod_base = OTHER; note = 5-methyl cytidine
  modified_base 17: mod_base = OTHER; note = 5-methyl cytidine
ttgatagatggcaggtcagg

SEQ ID NO: 323 - RNA, 20 nt, synthetic construct
  source 1..20: mol_type = other RNA
  modified_base 1..20: mod_base = OTHER; note = Phosphorothioate linkage
  modified_base 1..20: mod_base = OTHER; note = 2'-O-(2-methoxyethyl) ribonucleotide
  modified_base 11: mod_base = OTHER; note = 5-methyl cytidine
  modified_base 14..15: mod_base = OTHER; note = 5-methyl cytidine
  modified_base 17: mod_base = OTHER; note = 5-methyl cytidine
gaaatttatgcggccactgt

SEQ ID NO: 324 - RNA, 20 nt, synthetic construct
  source 1..20: mol_type = other RNA
  modified_base 1..20: mod_base = OTHER; note = Phosphorothioate linkage
  modified_base 1..20: mod_base = OTHER; note = 2'-O-(2-methoxyethyl) ribonucleotide
  modified_base 2..6: mod_base = OTHER; note = 5-methyl cytidine
  modified_base 14: mod_base = OTHER; note = 5-methyl cytidine
gccccctagaggacattttt

SEQ ID NO: 325 - RNA, 20 nt, synthetic construct
  source 1..20: mol_type = other RNA
  modified_base 1..20: mod_base = OTHER; note = Phosphorothioate linkage
  modified_base 1..20: mod_base = OTHER; note = 2'-O-(2-methoxyethyl) ribonucleotide
  modified_base 1: mod_base = OTHER; note = 5-methyl cytidine
  modified_base 5..6: mod_base = OTHER; note = 5-methyl cytidine
  modified_base 10: mod_base = OTHER; note = 5-methyl cytidine
  modified_base 13: mod_base = OTHER; note = 5-methyl cytidine
  modified_base 16: mod_base = OTHER; note = 5-methyl cytidine
cgttccaaacagcagcgtta

SEQ ID NO: 326 - RNA, 20 nt, synthetic construct
  source 1..20: mol_type = other RNA
  modified_base 1..20: mod_base = OTHER; note = Phosphorothioate linkage
  modified_base 1..20: mod_base = OTHER; note = 2'-O-(2-methoxyethyl) ribonucleotide
  modified_base 3: mod_base = OTHER; note = 5-methyl cytidine
  modified_base 6: mod_base = OTHER; note = 5-methyl cytidine
  modified_base 11: mod_base = OTHER; note = 5-methyl cytidine
  modified_base 13: mod_base = OTHER; note = 5-methyl cytidine
  modified_base 19: mod_base = OTHER; note = 5-methyl cytidine
ggctgcagatctctatatca

SEQ ID NO: 327 - RNA, 20 nt, synthetic construct
  source 1..20: mol_type = other RNA
  modified_base 1..20: mod_base = OTHER; note = Phosphorothioate linkage
  modified_base 1..20: mod_base = OTHER; note = 2'-O-(2-methoxyethyl) ribonucleotide
  modified_base 1: mod_base = OTHER; note = 5-methyl cytidine
  modified_base 4: mod_base = OTHER; note = 5-methyl cytidine
  modified_base 8..10: mod_base = OTHER; note = 5-methyl cytidine
  modified_base 14..15: mod_base = OTHER; note = 5-methyl cytidine
  modified_base 19..20: mod_base = OTHER; note = 5-methyl cytidine
cggcattccctgacctatcc

SEQ ID NO: 328 - RNA, 20 nt, synthetic construct
  source 1..20: mol_type = other RNA
  modified_base 1..20: mod_base = OTHER; note = Phosphorothioate linkage
  modified_base 1..20: mod_base = OTHER; note = 2'-O-(2-methoxyethyl) ribonucleotide
  modified_base 9: mod_base = OTHER; note = 5-methyl cytidine
  modified_base 14..16: mod_base = OTHER; note = 5-methyl cytidine
  modified_base 20: mod_base = OTHER; note = 5-methyl cytidine
gttaagtacgtgaccctatc

SEQ ID NO: 329 - RNA, 20 nt, synthetic construct
  source 1..20: mol_type = other RNA
  modified_base 1..20: mod_base = OTHER; note = Phosphorothioate linkage
  modified_base 1..20: mod_base = OTHER; note = 2'-O-(2-methoxyethyl) ribonucleotide
  modified_base 2: mod_base = OTHER; note = 5-methyl cytidine
  modified_base 5: mod_base = OTHER; note = 5-methyl cytidine
  modified_base 10: mod_base = OTHER; note = 5-methyl cytidine
  modified_base 13..15: mod_base = OTHER; note = 5-methyl cytidine
acagcagaacatcccgtgaa

SEQ ID NO: 330 - RNA, 20 nt, synthetic construct
  source 1..20: mol_type = other RNA
  modified_base 1..20: mod_base = OTHER; note = Phosphorothioate linkage
  modified_base 1..20: mod_base = OTHER; note = 2'-O-(2-methoxyethyl) ribonucleotide
  modified_base 17..18: mod_base = OTHER; note = 5-methyl cytidine
gtgtgaaatgatggtaccag

SEQ ID NO: 331 - RNA, 20 nt, synthetic construct
  source 1..20: mol_type = other RNA
  modified_base 1..20: mod_base = OTHER; note = Phosphorothioate linkage
  modified_base 1..20: mod_base = OTHER; note = 2'-O-(2-methoxyethyl) ribonucleotide
  modified_base 1: mod_base = OTHER; note = 5-methyl cytidine
  modified_base 6: mod_base = OTHER; note = 5-methyl cytidine
  modified_base 11: mod_base = OTHER; note = 5-methyl cytidine
  modified_base 13: mod_base = OTHER; note = 5-methyl cytidine
  modified_base 18: mod_base = OTHER; note = 5-methyl cytidine
ctaagcgtttctctagtcat

SEQ ID NO: 332 - RNA, 20 nt, synthetic construct
  source 1..20: mol_type = other RNA
  modified_base 1..20: mod_base = OTHER; note = Phosphorothioate linkage
  modified_base 1..20: mod_base = OTHER; note = 2'-O-(2-methoxyethyl) ribonucleotide
  modified_base 2: mod_base = OTHER; note = 5-methyl cytidine
  modified_base 4..5: mod_base = OTHER; note = 5-methyl cytidine
  modified_base 9..11: mod_base = OTHER; note = 5-methyl cytidine
  modified_base 17..18: mod_base = OTHER; note = 5-methyl cytidine
acgccaaacccttgatccag

SEQ ID NO: 333 - RNA, 20 nt, synthetic construct
  source 1..20: mol_type = other RNA
  modified_base 1..20: mod_base = OTHER; note = Phosphorothioate linkage
  modified_base 1..20: mod_base = OTHER; note = 2'-O-(2-methoxyethyl) ribonucleotide
  modified_base 6: mod_base = OTHER; note = 5-methyl cytidine
  modified_base 9: mod_base = OTHER; note = 5-methyl cytidine
tgggacagcgtggattaata

SEQ ID NO: 334 - RNA, 20 nt, synthetic construct
  source 1..20: mol_type = other RNA
  modified_base 1..20: mod_base = OTHER; note = Phosphorothioate linkage
  modified_base 1..20: mod_base = OTHER; note = 2'-O-(2-methoxyethyl) ribonucleotide
  modified_base 6: mod_base = OTHER; note = 5-methyl cytidine
  modified_base 10..11: mod_base = OTHER; note = 5-methyl cytidine
  modified_base 14: mod_base = OTHER; note = 5-methyl cytidine
  modified_base 19..20: mod_base = OTHER; note = 5-methyl cytidine
taagactttccagcatgtcc

SEQ ID NO: 335 - RNA, 20 nt, synthetic construct
  source 1..20: mol_type = other RNA
  modified_base 1..20: mod_base = OTHER; note = Phosphorothioate linkage
  modified_base 1..20: mod_base = OTHER; note = 2'-O-(2-methoxyethyl) ribonucleotide
  modified_base 5: mod_base = OTHER; note = 5-methyl cytidine
  modified_base 7..9: mod_base = OTHER; note = 5-methyl cytidine
  modified_base 14: mod_base = OTHER; note = 5-methyl cytidine
taggcacccaaggctttatt

SEQ ID NO: 336 - RNA, 20 nt, synthetic construct
  source 1..20: mol_type = other RNA
  modified_base 1..20: mod_base = OTHER; note = Phosphorothioate linkage
  modified_base 1..20: mod_base = OTHER; note = 2'-O-(2-methoxyethyl) ribonucleotide
  modified_base 6..7: mod_base = OTHER; note = 5-methyl cytidine
  modified_base 15: mod_base = OTHER; note = 5-methyl cytidine
  modified_base 19..20: mod_base = OTHER; note = 5-methyl cytidine
aagagccggagattcgaacc

SEQ ID NO: 337 - RNA, 20 nt, synthetic construct
  source 1..20: mol_type = other RNA
  modified_base 1..20: mod_base = OTHER; note = Phosphorothioate linkage
  modified_base 1..20: mod_base = OTHER; note = 2'-O-(2-methoxyethyl) ribonucleotide
  modified_base 7..8: mod_base = OTHER; note = 5-methyl cytidine
  modified_base 16: mod_base = OTHER; note = 5-methyl cytidine
  modified_base 20: mod_base = OTHER; note = 5-methyl cytidine
gaagagccggagattcgaac

SEQ ID NO: 338 - RNA, 20 nt, synthetic construct
  source 1..20: mol_type = other RNA
  modified_base 1..20: mod_base = OTHER; note = Phosphorothioate linkage
  modified_base 1..20: mod_base = OTHER; note = 2'-O-(2-methoxyethyl) ribonucleotide
  modified_base 9..10: mod_base = OTHER; note = 5-methyl cytidine
  modified_base 18: mod_base = OTHER; note = 5-methyl cytidine
gtgaagagccggagattcga

SEQ ID NO: 339 - DNA, 20 bp, synthetic construct
  source 1..20: mol_type = other DNA
  modified_base 1..20: mod_base = OTHER; note = Phosphorothioate linkage
  modified_base 1..5: mod_base = OTHER; note = 2'-O-(2-methoxyethyl) ribonucleotide
  misc_feature 6..15: note = DNA
  modified_base 16..20: mod_base = OTHER; note = 2'-O-(2-methoxyethyl) ribonucleotide
  modified_base 2: mod_base = OTHER; note = 5-methyl cytidine
  modified_base 11..12: mod_base = OTHER; note = 5-methyl cytidine
  modified_base 20: mod_base = OTHER; note = 5-methyl cytidine
acgtgaagagccggagattc

SEQ ID NO: 340 - RNA, 20 nt, synthetic construct
  source 1..20: mol_type = other RNA
  modified_base 1..20: mod_base = OTHER; note = Phosphorothioate linkage
  modified_base 1..20: mod_base = OTHER; note = 2'-O-(2-methoxyethyl) ribonucleotide
  modified_base 1: mod_base = OTHER; note = 5-methyl cytidine
  modified_base 4: mod_base = OTHER; note = 5-methyl cytidine
  modified_base 13..14: mod_base = OTHER; note = 5-methyl cytidine
cgacgtgaagagccggagat

SEQ ID NO: 341 - RNA, 20 nt, synthetic construct
  source 1..20: mol_type = other RNA
  modified_base 1..20: mod_base = OTHER; note = Phosphorothioate linkage
  modified_base 1..20: mod_base = OTHER; note = 2'-O-(2-methoxyethyl) ribonucleotide
  modified_base 2: mod_base = OTHER; note = 5-methyl cytidine
  modified_base 5: mod_base = OTHER; note = 5-methyl cytidine
  modified_base 14..15: mod_base = OTHER; note = 5-methyl cytidine
tcgacgtgaagagccggaga

SEQ ID NO: 342 - RNA, 20 nt, synthetic construct
  source 1..20: mol_type = other RNA
  modified_base 1..20: mod_base = OTHER; note = Phosphorothioate linkage
  modified_base 1..20: mod_base = OTHER; note = 2'-O-(2-methoxyethyl) ribonucleotide
  modified_base 1..3: mod_base = OTHER; note = 5-methyl cytidine
  modified_base 10: mod_base = OTHER; note = 5-methyl cytidine
cccgttttacagaaagtgaa

SEQ ID NO: 343 - RNA, 20 nt, synthetic construct
  source 1..20: mol_type = other RNA
  modified_base 1..20: mod_base = OTHER; note = Phosphorothioate linkage
  modified_base 1..20: mod_base = OTHER; note = 2'-O-(2-methoxyethyl) ribonucleotide
  modified_base 2..5: mod_base = OTHER; note = 5-methyl cytidine
  modified_base 12: mod_base = OTHER; note = 5-methyl cytidine
accccgttttacagaaagtg

SEQ ID NO: 344 - RNA, 20 nt, synthetic construct
  source 1..20: mol_type = other RNA
  modified_base 1..20: mod_base = OTHER; note = Phosphorothioate linkage
  modified_base 1..20: mod_base = OTHER; note = 2'-O-(2-methoxyethyl) ribonucleotide
  modified_base 4..7: mod_base = OTHER; note = 5-methyl cytidine
  modified_base 14: mod_base = OTHER; note = 5-methyl cytidine
ttaccccgttttacagaaag

SEQ ID NO: 345 - RNA, 20 nt, synthetic construct
  source 1..20: mol_type = other RNA
  modified_base 1..20: mod_base = OTHER; note = Phosphorothioate linkage
  modified_base 1..20: mod_base = OTHER; note = 2'-O-(2-methoxyethyl) ribonucleotide
  modified_base 6..9: mod_base = OTHER; note = 5-methyl cytidine
  modified_base 16: mod_base = OTHER; note = 5-methyl cytidine
gattaccccgttttacagaa

SEQ ID NO: 346 - RNA, 20 nt, synthetic construct
  source 1..20: mol_type = other RNA
  modified_base 1..20: mod_base = OTHER; note = Phosphorothioate linkage
  modified_base 1..20: mod_base = OTHER; note = 2'-O-(2-methoxyethyl) ribonucleotide
  modified_base 8..11: mod_base = OTHER; note = 5-methyl cytidine
  modified_base 18: mod_base = OTHER; note = 5-methyl cytidine
tagattaccccgttttacag

SEQ ID NO: 347 - RNA, 20 nt, synthetic construct
  source 1..20: mol_type = other RNA
  modified_base 1..20: mod_base = OTHER; note = Phosphorothioate linkage
  modified_base 1..20: mod_base = OTHER; note = 2'-O-(2-methoxyethyl) ribonucleotide
  modified_base 10..13: mod_base = OTHER; note = 5-methyl cytidine
  modified_base 20: mod_base = OTHER; note = 5-methyl cytidine
aatagattaccccgttttac

SEQ ID NO: 348 - DNA, 20 bp, synthetic construct
  source 1..20: mol_type = other DNA
  modified_base 1..20: mod_base = OTHER; note = Phosphorothioate linkage
  modified_base 1..5: mod_base = OTHER; note = 2'-O-(2-methoxyethyl) ribonucleotide
  misc_feature 6..8: note = DNA
  modified_base 9: mod_base = OTHER; note = 2'-O-(2-methoxyethyl) ribonucleotide
  misc_feature 10..11: note = DNA
  modified_base 12: mod_base = OTHER; note = 2'-O-(2-methoxyethyl) ribonucleotide
  misc_feature 13..15: note = DNA
  modified_base 16..20: mod_base = OTHER; note = 2'-O-(2-methoxyethyl) ribonucleotide
  modified_base 2: mod_base = OTHER; note = 5-methyl cytidine
  modified_base 11..12: mod_base = OTHER; note = 5-methyl cytidine
  modified_base 20: mod_base = OTHER; note = 5-methyl cytidine
acgtgaagagccggagattc

SEQ ID NO: 349 - DNA, 20 bp, synthetic construct
  source 1..20: mol_type = other DNA
  modified_base 1..20: mod_base = OTHER; note = Phosphorothioate linkage
  modified_base 1..5: mod_base = OTHER; note = 2'-O-(2-methoxyethyl) ribonucleotide
  modified_base 6: mod_base = OTHER; note = locked nucleic acid
  misc_feature 7..8: note = DNA
  modified_base 9: mod_base = OTHER; note = locked nucleic acid
  misc_feature 10..11: note = DNA
  modified_base 12: mod_base = OTHER; note = Locked nucleic acid
  misc_feature 13..14: note = DNA
  modified_base 15: mod_base = OTHER; note = Locked nucleic acid
  modified_base 16..20: mod_base = OTHER; note = 2'-O-(2-methoxyethyl) ribonucleotide
  modified_base 2: mod_base = OTHER; note = 5-methyl cytidine
  modified_base 11..12: mod_base = OTHER; note = 5-methyl cytidine
  modified_base 20: mod_base = OTHER; note = 5-methyl cytidine
acgtgaagagccggagattc

SEQ ID NO: 350 - DNA, 20 bp, synthetic construct
  source 1..20: mol_type = other DNA
  modified_base 1..20: mod_base = OTHER; note = Phosphorothioate linkage
  modified_base 1..3: mod_base = OTHER; note = 2'-O-(2-methoxyethyl) ribonucleotide
  modified_base 4: mod_base = OTHER; note = locked nucleic acid
  modified_base 5: mod_base = OTHER; note = 2'-O-(2-methoxyethyl) ribonucleotide
  misc_feature 6..7: note = DNA
  modified_base 8: mod_base = OTHER; note = locked nucleic acid
  misc_feature 9..11: note = DNA
  modified_base 12: mod_base = OTHER; note = Locked nucleic acid
  misc_feature 13..15: note = DNA
  modified_base 16: mod_base = OTHER; note = Locked nucleic acid
  modified_base 17..20: mod_base = OTHER; note = 2'-O-(2-methoxyethyl) ribonucleotide
  modified_base 2: mod_base = OTHER; note = 5-methyl cytidine
  modified_base 11..12: mod_base = OTHER; note = 5-methyl cytidine
  modified_base 20: mod_base = OTHER; note = 5-methyl cytidine
acgtgaagagccggagattc

SEQ ID NO: 351 - DNA, 20 bp, synthetic construct
  source 1..20: mol_type = other DNA
  modified_base 1..20: mod_base = OTHER; note = Phosphorothioate linkage
  modified_base 1..4: mod_base = OTHER; note = 2'-O-(2-methoxyethyl) ribonucleotide
  modified_base 5: mod_base = OTHER; note = locked nucleic acid
  misc_feature 6..8: note = DNA
  modified_base 9: mod_base = OTHER; note = locked nucleic acid
  misc_feature 10..12: note = DNA
  modified_base 13: mod_base = OTHER; note = Locked nucleic acid
  misc_feature 14..15: note = DNA
  modified_base 16: mod_base = OTHER; note = 2'-O-(2-methoxyethyl) ribonucleotide
  modified_base 17: mod_base = OTHER; note = Locked nucleic acid
  modified_base 18..20: mod_base = OTHER; note = 2'-O-(2-methoxyethyl) ribonucleotide
  modified_base 2: mod_base = OTHER; note = 5-methyl cytidine
  modified_base 11..12: mod_base = OTHER; note = 5-methyl cytidine
  modified_base 20: mod_base = OTHER; note = 5-methyl cytidine
acgtgaagagccggagattc

SEQ ID NO: 352 - RNA, 20 nt, synthetic construct
  source 1..20: mol_type = other RNA
  modified_base 1..20: mod_base = OTHER; note = Phosphorothioate linkage
  modified_base 1..5: mod_base = OTHER; note = 2'-O-(2-methoxyethyl) ribonucleotide
  modified_base 6: mod_base = OTHER; note = locked nucleic acid
  modified_base 7..8: mod_base = OTHER; note = 2'-O-(2-methoxyethyl) ribonucleotide
  modified_base 9: mod_base = OTHER; note = locked nucleic acid
  modified_base 10..11: mod_base = OTHER; note = 2'-O-(2-methoxyethyl) ribonucleotide
  modified_base 12: mod_base = OTHER; note = Locked nucleic acid
  modified_base 13..14: mod_base = OTHER; note = 2'-O-(2-methoxyethyl) ribonucleotide
  modified_base 15: mod_base = OTHER; note = Locked nucleic acid
  modified_base 16..20: mod_base = OTHER; note = 2'-O-(2-methoxyethyl) ribonucleotide
  modified_base 2: mod_base = OTHER; note = 5-methyl cytidine
  modified_base 11..12: mod_base = OTHER; note = 5-methyl cytidine
  modified_base 20: mod_base = OTHER; note = 5-methyl cytidine
acgtgaagagccggagattc

SEQ ID NO: 353 - RNA, 20 nt, synthetic construct
  source 1..20: mol_type = other RNA
  modified_base 1..20: mod_base = OTHER; note = Phosphorothioate linkage
  modified_base 1..3: mod_base = OTHER; note = 2'-O-(2-methoxyethyl) ribonucleotide
  modified_base 4: mod_base = OTHER; note = locked nucleic acid
  modified_base 5: mod_base = OTHER; note = 2'-O-(2-methoxyethyl) ribonucleotide
  modified_base 6: mod_base = OTHER; note = locked nucleic acid
  modified_base 7: mod_base = OTHER; note = 2'-O-(2-methoxyethyl) ribonucleotide
  modified_base 8: mod_base = OTHER; note = Locked nucleic acid
  modified_base 9: mod_base = OTHER; note = 2'-O-(2-methoxyethyl) ribonucleotide
  modified_base 10: mod_base = OTHER; note = Locked nucleic acid
  modified_base 11: mod_base = OTHER; note = 2'-O-(2-methoxyethyl) ribonucleotide
  modified_base 12: mod_base = OTHER; note = Locked nucleic acid
  modified_base 13: mod_base = OTHER; note = 2'-O-(2-methoxyethyl) ribonucleotide
  modified_base 14: mod_base = OTHER; note = Locked nucleic acid
  modified_base 15: mod_base = OTHER; note = 2'-O-(2-methoxyethyl) ribonucleotide
  modified_base 16: mod_base = OTHER; note = Locked nucleic acid
  modified_base 17: mod_base = OTHER; note = 2'-O-(2-methoxyethyl) ribonucleotide
  modified_base 18: mod_base = OTHER; note = Locked nucleic acid
  modified_base 19..20: mod_base = OTHER; note = 2'-O-(2-methoxyethyl) ribonucleotide
  modified_base 2: mod_base = OTHER; note = 5-methyl cytidine
  modified_base 11..12: mod_base = OTHER; note = 5-methyl cytidine
  modified_base 20: mod_base = OTHER; note = 5-methyl cytidine
acgtgaagagccggagattc

SEQ ID NO: 354 - RNA, 20 nt, synthetic construct
  source 1..20: mol_type = other RNA
  modified_base 1..20: mod_base = OTHER; note = Phosphorothioate linkage
  modified_base 1..2: mod_base = OTHER; note = 2'-O-(2-methoxyethyl) ribonucleotide
  modified_base 3: mod_base = OTHER; note = locked nucleic acid
  modified_base 4: mod_base = OTHER; note = 2'-O-(2-methoxyethyl) ribonucleotide
  modified_base 5: mod_base = OTHER; note = locked nucleic acid
  modified_base 6: mod_base = OTHER; note = 2'-O-(2-methoxyethyl) ribonucleotide
  modified_base 7: mod_base = OTHER; note = Locked nucleic acid
  modified_base 8: mod_base = OTHER; note = 2'-O-(2-methoxyethyl) ribonucleotide
  modified_base 9: mod_base = OTHER; note = Locked nucleic acid
  modified_base 10: mod_base = OTHER; note = 2'-O-(2-methoxyethyl) ribonucleotide
  modified_base 11: mod_base = OTHER; note = Locked nucleic acid
  modified_base 12: mod_base = OTHER; note = 2'-O-(2-methoxyethyl) ribonucleotide
  modified_base 13: mod_base = OTHER; note = Locked nucleic acid
  modified_base 14: mod_base = OTHER; note = 2'-O-(2-methoxyethyl) ribonucleotide
  modified_base 15: mod_base = OTHER; note = Locked nucleic acid
  modified_base 16: mod_base = OTHER; note = 2'-O-(2-methoxyethyl) ribonucleotide
  modified_base 17: mod_base = OTHER; note = Locked nucleic acid
  modified_base 18..20: mod_base = OTHER; note = 2'-O-(2-methoxyethyl) ribonucleotide
  modified_base 2: mod_base = OTHER; note = 5-methyl cytidine
  modified_base 11..12: mod_base = OTHER; note = 5-methyl cytidine
  modified_base 20: mod_base = OTHER; note = 5-methyl cytidine
acgtgaagagccggagattc

SEQ ID NO: 355 - RNA, 20 nt, synthetic construct
  source 1..20: mol_type = other RNA
  modified_base 1..20: mod_base = OTHER; note = Phosphorothioate linkage
  modified_base 1..2: mod_base = OTHER; note = 2'-O-(2-methoxyethyl) ribonucleotide
  modified_base 3: mod_base = OTHER; note = locked nucleic acid
  modified_base 4..5: mod_base = OTHER; note = 2'-O-(2-methoxyethyl) ribonucleotide
  modified_base 6: mod_base = OTHER; note = locked nucleic acid
  modified_base 7..8: mod_base = OTHER; note = 2'-O-(2-methoxyethyl) ribonucleotide
  modified_base 9: mod_base = OTHER; note = Locked nucleic acid
  modified_base 10..11: mod_base = OTHER; note = 2'-O-(2-methoxyethyl) ribonucleotide
  modified_base 12: mod_base = OTHER; note = Locked nucleic acid
  modified_base 13..14: mod_base = OTHER; note = 2'-O-(2-methoxyethyl) ribonucleotide
  modified_base 15: mod_base = OTHER; note = Locked nucleic acid
  modified_base 16..17: mod_base = OTHER; note = 2'-O-(2-methoxyethyl) ribonucleotide
  modified_base 18: mod_base = OTHER; note = Locked nucleic acid
  modified_base 19..20: mod_base = OTHER; note = 2'-O-(2-methoxyethyl) ribonucleotide
  modified_base 2: mod_base = OTHER; note = 5-methyl cytidine
  modified_base 11..12: mod_base = OTHER; note = 5-methyl cytidine
  modified_base 20: mod_base = OTHER; note = 5-methyl cytidine
acgtgaagagccggagattc

SEQ ID NO: 356 - RNA, 20 nt, synthetic construct
  source 1..20: mol_type = other RNA
  modified_base 1..20: mod_base = OTHER; note = Phosphorothioate linkage
  modified_base 1..4: mod_base = OTHER; note = 2'-O-(2-methoxyethyl) ribonucleotide
  modified_base 5: mod_base = OTHER; note = locked nucleic acid
  modified_base 6..8: mod_base = OTHER; note = 2'-O-(2-methoxyethyl) ribonucleotide
  modified_base 9: mod_base = OTHER; note = locked nucleic acid
  modified_base 10..12: mod_base = OTHER; note = 2'-O-(2-methoxyethyl) ribonucleotide
  modified_base 13: mod_base = OTHER; note = Locked nucleic acid
  modified_base 14..16: mod_base = OTHER; note = 2'-O-(2-methoxyethyl) ribonucleotide
  modified_base 17: mod_base = OTHER; note = Locked nucleic acid
  modified_base 18..20: mod_base = OTHER; note = 2'-O-(2-methoxyethyl) ribonucleotide
  modified_base 2: mod_base = OTHER; note = 5-methyl cytidine
  modified_base 11..12: mod_base = OTHER; note = 5-methyl cytidine
  modified_base 20: mod_base = OTHER; note = 5-methyl cytidine
acgtgaagagccggagattc

SEQ ID NO: 357 - RNA, 20 nt, synthetic construct
  source 1..20: mol_type = other RNA
  modified_base 1..20: mod_base = OTHER; note = Phosphorothioate linkage
  modified_base 1..3: mod_base = OTHER; note = 2'-O-(2-methoxyethyl) ribonucleotide
  modified_base 4: mod_base = OTHER; note = locked nucleic acid
  modified_base 5..7: mod_base = OTHER; note = 2'-O-(2-methoxyethyl) ribonucleotide
  modified_base 8: mod_base = OTHER; note = locked nucleic acid
  modified_base 9..11: mod_base = OTHER; note = 2'-O-(2-methoxyethyl) ribonucleotide
  modified_base 12: mod_base = OTHER; note = Locked nucleic acid
  modified_base 13..15: mod_base = OTHER; note = 2'-O-(2-methoxyethyl) ribonucleotide
  modified_base 16: mod_base = OTHER; note = Locked nucleic acid
  modified_base 17..20: mod_base = OTHER; note = 2'-O-(2-methoxyethyl) ribonucleotide
  modified_base 2: mod_base = OTHER; note = 5-methyl cytidine
  modified_base 11..12: mod_base = OTHER; note = 5-methyl cytidine
  modified_base 20: mod_base = OTHER; note = 5-methyl cytidine
acgtgaagagccggagattc

SEQ ID NO: 358 - RNA, 20 nt, synthetic construct
  source 1..20: mol_type = other RNA
  modified_base 1..20: mod_base = OTHER; note = Phosphorothioate linkage
  modified_base 1..5: mod_base = OTHER; note = 2'-O-(2-methoxyethyl) ribonucleotide
  modified_base 6: mod_base = OTHER; note = Locked nucleic acid
  modified_base 7..10: mod_base = OTHER; note = 2'-O-(2-methoxyethyl) ribonucleotide
  modified_base 11: mod_base = OTHER; note = Locked nucleic acid
  modified_base 12..15: mod_base = OTHER; note = 2'-O-(2-methoxyethyl) ribonucleotide
  modified_base 16: mod_base = OTHER; note = Locked nucleic acid
  modified_base 17..20: mod_base = OTHER; note = 2'-O-(2-methoxyethyl) ribonucleotide
  modified_base 2: mod_base = OTHER; note = 5-methyl cytidine
  modified_base 11..12: mod_base = OTHER; note = 5-methyl cytidine
  modified_base 20: mod_base = OTHER; note = 5-methyl cytidine
acgtgaagagccggagattc

SEQ ID NO: 359 - RNA, 20 nt, synthetic construct
  source 1..20: mol_type = other RNA
  modified_base 1..20: mod_base = OTHER; note = Phosphorothioate linkage
  modified_base 1..4: mod_base = OTHER; note = 2'-O-(2-methoxyethyl) ribonucleotide
  modified_base 5: mod_base = OTHER; note = Locked nucleic acid
  modified_base 6..9: mod_base = OTHER; note = 2'-O-(2-methoxyethyl) ribonucleotide
  modified_base 10: mod_base = OTHER; note = Locked nucleic acid
  modified_base 11..14: mod_base = OTHER; note = 2'-O-(2-methoxyethyl) ribonucleotide
  modified_base 15: mod_base = OTHER; note = Locked nucleic acid
  modified_base 16..20: mod_base = OTHER; note = 2'-O-(2-methoxyethyl) ribonucleotide
  modified_base 2: mod_base = OTHER; note = 5-methyl cytidine
  modified_base 11..12: mod_base = OTHER; note = 5-methyl cytidine
  modified_base 20: mod_base = OTHER; note = 5-methyl cytidine
acgtgaagagccggagattc

SEQ ID NO: 360 - RNA, 20 nt, synthetic construct
  source 1..20: mol_type = other RNA
  modified_base 1..20: mod_base = OTHER; note = Phosphorothioate linkage
  modified_base 1..20: mod_base = OTHER; note = 2'-O-(2-methoxyethyl) ribonucleotide
  modified_base 1: mod_base = OTHER; note = 5-methyl cytidine
  modified_base 11: mod_base = OTHER; note = 5-methyl cytidine
  modified_base 20: mod_base = OTHER; note = 5-methyl cytidine
ctggataggtcagggaatgc

SEQ ID NO: 361 - RNA, 20 nt, synthetic construct
  source 1..20: mol_type = other RNA
  modified_base 1..20: mod_base = OTHER; note = Phosphorothioate linkage
  modified_base 1..20: mod_base = OTHER; note = 2'-O-(2-methoxyethyl) ribonucleotide
  modified_base 7: mod_base = OTHER; note = 5-methyl cytidine
  modified_base 10: mod_base = OTHER; note = 5-methyl cytidine
  modified_base 13..15: mod_base = OTHER; note = 5-methyl cytidine
  modified_base 17: mod_base = OTHER; note = 5-methyl cytidine
  modified_base 19..20: mod_base = OTHER; note = 5-methyl cytidine
agagatctgcagccctcacc

SEQ ID NO: 362 - RNA, 20 nt, synthetic construct
  source 1..20: mol_type = other RNA
  modified_base 1..20: mod_base = OTHER; note = Phosphorothioate linkage
  modified_base 1..20: mod_base = OTHER; note = 2'-O-(2-methoxyethyl) ribonucleotide
  modified_base 9: mod_base = OTHER; note = 5-methyl cytidine
  modified_base 12: mod_base = OTHER; note = 5-methyl cytidine
  modified_base 15..17: mod_base = OTHER; note = 5-methyl cytidine
  modified_base 19: mod_base = OTHER; note = 5-methyl cytidine
atagagatctgcagccctca

SEQ ID NO: 363 - RNA, 20 nt, synthetic construct
  source 1..20: mol_type = other RNA
  modified_base 1..20: mod_base = OTHER; note = Phosphorothioate linkage
  modified_base 1..20: mod_base = OTHER; note = 2'-O-(2-methoxyethyl) ribonucleotide
  modified_base 11: mod_base = OTHER; note = 5-methyl cytidine
  modified_base 14: mod_base = OTHER; note = 5-methyl cytidine
  modified_base 17..19: mod_base = OTHER; note = 5-methyl cytidine
atatagagatctgcagccct

SEQ ID NO: 364 - DNA, 20 bp, synthetic construct
  source 1..20: mol_type = other DNA
  modified_base 1..20: mod_base = OTHER; note = Phosphorothioate linkage
  modified_base 1..5: mod_base = OTHER; note = 2'-O-(2-methoxyethyl) ribonucleotide
  misc_feature 6..15: note = DNA
  modified_base 16..20: mod_base = OTHER; note = 2'-O-(2-methoxyethyl) ribonucleotide
  modified_base 13: mod_base = OTHER; note = 5-methyl cytidine
  modified_base 16: mod_base = OTHER; note = 5-methyl cytidine
  modified_base 19..20: mod_base = OTHER; note = 5-methyl cytidine
tgatatagagatctgcagcc

SEQ ID NO: 365 - RNA, 20 nt, synthetic construct
  source 1..20: mol_type = other RNA
  modified_base 1..20: mod_base = OTHER; note = Phosphorothioate linkage
  modified_base 1..20: mod_base = OTHER; note = 2'-O-(2-methoxyethyl) ribonucleotide
  modified_base 15: mod_base = OTHER; note = 5-methyl cytidine
  modified_base 18: mod_base = OTHER; note = 5-methyl cytidine
aatgatatagagatctgcag

SEQ ID NO: 366 - RNA, 20 nt, synthetic construct
  source 1..20: mol_type = other RNA
  modified_base 1..20: mod_base = OTHER; note = Phosphorothioate linkage
  modified_base 1..20: mod_base = OTHER; note = 2'-O-(2-methoxyethyl) ribonucleotide
  modified_base 17: mod_base = OTHER; note = 5-methyl cytidine
  modified_base 20: mod_base = OTHER; note = 5-methyl cytidine
ataatgatatagagatctgc

SEQ ID NO: 367 - RNA, 20 nt, synthetic construct
  source 1..20: mol_type = other RNA
  modified_base 1..20: mod_base = OTHER; note = Phosphorothioate linkage
  modified_base 1..20: mod_base = OTHER; note = 2'-O-(2-methoxyethyl) ribonucleotide
  modified_base 3: mod_base = OTHER; note = 5-methyl cytidine
  modified_base 5: mod_base = OTHER; note = 5-methyl cytidine
  modified_base 9: mod_base = OTHER; note = 5-methyl cytidine
aactctgtctttgagattgt

SEQ ID NO: 368 - RNA, 20 nt, synthetic construct
  source 1..20: mol_type = other RNA
  modified_base 1..20: mod_base = OTHER; note = Phosphorothioate linkage
  modified_base 1..20: mod_base = OTHER; note = 2'-O-(2-methoxyethyl) ribonucleotide
  modified_base 2: mod_base = OTHER; note = 5-methyl cytidine
  modified_base 4..5: mod_base = OTHER; note = 5-methyl cytidine
  modified_base 8: mod_base = OTHER; note = 5-methyl cytidine
gcacctgctgtttaatttaa

SEQ ID NO: 369 - DNA, 20 bp, synthetic construct
  source 1..20: mol_type = other DNA
  modified_base 1..20: mod_base = OTHER; note = Phosphorothioate linkage
  modified_base 1..5: mod_base = OTHER; note = 2'-O-(2-methoxyethyl) ribonucleotide
  misc_feature 6..8: note = DNA
  modified_base 9: mod_base = OTHER; note = 2'-O-(2-methoxyethyl) ribonucleotide
  misc_feature 10..11: note = DNA
  modified_base 12: mod_base = OTHER; note = 2'-O-(2-methoxyethyl) ribonucleotide
  misc_feature 13..15: note = DNA
  modified_base 16..20: mod_base = OTHER; note = 2'-O-(2-methoxyethyl) ribonucleotide
  modified_base 13: mod_base = OTHER; note = 5-methyl cytidine
  modified_base 16: mod_base = OTHER; note = 5-methyl cytidine
  modified_base 19..20: mod_base = OTHER; note = 5-methyl cytidine
tgatatagagatctgcagcc

SEQ ID NO: 370 - DNA, 20 bp, synthetic construct
  source 1..20: mol_type = other DNA
  modified_base 1..20: mod_base = OTHER; note = Phosphorothioate linkage
  modified_base 1..5: mod_base = OTHER; note = 2'-O-(2-methoxyethyl) ribonucleotide
  modified_base 6: mod_base = OTHER; note = Locked nucleic acid
  misc_feature 7..8: note = DNA
  modified_base 9: mod_base = OTHER; note = Locked nucleic acid
  misc_feature 10..11: note = DNA
  modified_base 12: mod_base = OTHER; note = Locked nucleic acid
  misc_feature 13..14: note = DNA
  modified_base 15: mod_base = OTHER; note = Locked nucleic acid
  modified_base 16..20: mod_base = OTHER; note = 2'-O-(2-methoxyethyl) ribonucleotide
  modified_base 13: mod_base = OTHER; note = 5-methyl cytidine
  modified_base 16: mod_base = OTHER; note = 5-methyl cytidine
  modified_base 19..20: mod_base = OTHER; note = 5-methyl cytidine
tgatatagagatctgcagcc

SEQ ID NO: 371 - DNA, 20 bp, synthetic construct
  source 1..20: mol_type = other DNA
  modified_base 1..20: mod_base = OTHER; note = Phosphorothioate linkage
  modified_base 1..3: mod_base = OTHER; note = 2'-O-(2-methoxyethyl) ribonucleotide
  modified_base 4: mod_base = OTHER; note = Locked nucleic acid
  modified_base 5: mod_base = OTHER; note = 2'-O-(2-methoxyethyl) ribonucleotide
  misc_feature 6..7: note = DNA
  modified_base 8: mod_base = OTHER; note = 2'-O-(2-methoxyethyl) ribonucleotide
  misc_feature 9..11: note = DNA
  modified_base 12: mod_base = OTHER; note = Locked nucleic acid
  misc_feature 13..15: note = DNA
  modified_base 16: mod_base = OTHER; note = Locked nucleic acid
  modified_base 17..20: mod_base = OTHER; note = 2'-O-(2-methoxyethyl) ribonucleotide
  modified_base 13: mod_base = OTHER; note = 5-methyl cytidine
  modified_base 16: mod_base = OTHER; note = 5-methyl cytidine
  modified_base 19..20: mod_base = OTHER; note = 5-methyl cytidine
tgatatagagatctgcagcc

SEQ ID NO: 372 - DNA, 20 bp, synthetic construct
  source 1..20: mol_type = other DNA
  modified_base 1..20: mod_base = OTHER; note = Phosphorothioate linkage
  modified_base 1..4: mod_base = OTHER; note = 2'-O-(2-methoxyethyl) ribonucleotide
  modified_base 5: mod_base = OTHER; note = Locked nucleic acid
  misc_feature 6..8: note = DNA
  modified_base 9: mod_base = OTHER; note = Locked nucleic acid
  misc_feature 10..12: note = DNA
  modified_base 13: mod_base = OTHER; note = Locked nucleic acid
  misc_feature 14..15: note = DNA
  modified_base 16: mod_base = OTHER; note = 2'-O-(2-methoxyethyl) ribonucleotide
  modified_base 17: mod_base = OTHER; note = Locked nucleic acid
  modified_base 18..20: mod_base = OTHER; note = 2'-O-(2-methoxyethyl) ribonucleotide
  modified_base 13: mod_base = OTHER; note = 5-methyl cytidine
  modified_base 16: mod_base = OTHER; note = 5-methyl cytidine
  modified_base 19..20: mod_base = OTHER; note = 5-methyl cytidine
tgatatagagatctgcagcc

SEQ ID NO: 373 - RNA, 20 nt, synthetic construct
  source 1..20: mol_type = other RNA
  modified_base 1..20: mod_base = OTHER; note = Phosphorothioate linkage
  modified_base 1..5: mod_base = OTHER; note = 2'-O-(2-methoxyethyl) ribonucleotide
  modified_base 6: mod_base = OTHER; note = Locked nucleic acid
  modified_base 7..8: mod_base = OTHER; note = 2'-O-(2-methoxyethyl) ribonucleotide
  modified_base 9: mod_base = OTHER; note = Locked nucleic acid
  modified_base 10..11: mod_base = OTHER; note = 2'-O-(2-methoxyethyl) ribonucleotide
  modified_base 12: mod_base = OTHER; note = Locked nucleic acid
  modified_base 13..14: mod_base = OTHER; note = 2'-O-(2-methoxyethyl) ribonucleotide
  modified_base 15: mod_base = OTHER; note = Locked nucleic acid
  modified_base 16..20: mod_base = OTHER; note = 2'-O-(2-methoxyethyl) ribonucleotide
  modified_base 13: mod_base = OTHER; note = 5-methyl cytidine
  modified_base 16: mod_base = OTHER; note = 5-methyl cytidine
  modified_base 19..20: mod_base = OTHER; note = 5-methyl cytidine
tgatatagagatctgcagcc

SEQ ID NO: 374 - RNA, 20 nt, synthetic construct
  source 1..20: mol_type = other RNA
  modified_base 1..20: mod_base = OTHER; note = Phosphorothioate linkage
  modified_base 1..3: mod_base = OTHER; note = 2'-O-(2-methoxyethyl) ribonucleotide
  modified_base 4: mod_base = OTHER; note = Locked nucleic acid
  modified_base 5: mod_base = OTHER; note = 2'-O-(2-methoxyethyl) ribonucleotide
  modified_base 6: mod_base = OTHER; note = Locked nucleic acid
  modified_base 7: mod_base = OTHER; note = 2'-O-(2-methoxyethyl) ribonucleotide
  modified_base 8: mod_base = OTHER; note = Locked nucleic acid
  modified_base 9: mod_base = OTHER; note = 2'-O-(2-methoxyethyl) ribonucleotide
  modified_base 10: mod_base = OTHER; note = Locked nucleic acid
  modified_base 11: mod_base = OTHER; note = 2'-O-(2-methoxyethyl) ribonucleotide
  modified_base 12: mod_base = OTHER; note = Locked nucleic acid
  modified_base 13: mod_base = OTHER; note = 2'-O-(2-methoxyethyl) ribonucleotide
  modified_base 14: mod_base = OTHER; note = Locked nucleic acid
  modified_base 15: mod_base = OTHER; note = 2'-O-(2-methoxyethyl) ribonucleotide
  modified_base 16: mod_base = OTHER; note = Locked nucleic acid
  modified_base 17: mod_base = OTHER; note = 2'-O-(2-methoxyethyl) ribonucleotide
  modified_base 18: mod_base = OTHER; note = Locked nucleic acid
  modified_base 19..20: mod_base = OTHER; note = 2'-O-(2-methoxyethyl) ribonucleotide
  modified_base 13: mod_base = OTHER; note = 5-methyl cytidine
  modified_base 16: mod_base = OTHER; note = 5-methyl cytidine
  modified_base 19..20: mod_base = OTHER; note = 5-methyl cytidine
tgatatagagatctgcagcc

SEQ ID NO: 375 - RNA, 20 nt, synthetic construct
  source 1..20: mol_type = other RNA
  modified_base 1..20: mod_base = OTHER; note = Phosphorothioate linkage
  modified_base 1..2: mod_base = OTHER; note = 2'-O-(2-methoxyethyl) ribonucleotide
  modified_base 3: mod_base = OTHER; note = Locked nucleic acid
  modified_base 4: mod_base = OTHER; note = 2'-O-(2-methoxyethyl) ribonucleotide
  modified_base 5: mod_base = OTHER; note = Locked nucleic acid
  modified_base 6: mod_base = OTHER; note = 2'-O-(2-methoxyethyl) ribonucleotide
  modified_base 7: mod_base = OTHER; note = Locked nucleic acid
  modified_base 8: mod_base = OTHER; note = 2'-O-(2-methoxyethyl) ribonucleotide
  modified_base 9: mod_base = OTHER; note = Locked nucleic acid
  modified_base 10: mod_base = OTHER; note = 2'-O-(2-methoxyethyl) ribonucleotide
  modified_base 11: mod_base = OTHER; note = Locked nucleic acid
  modified_base 12: mod_base = OTHER; note = 2'-O-(2-methoxyethyl) ribonucleotide
  modified_base 13: mod_base = OTHER; note = Locked nucleic acid
  modified_base 14: mod_base = OTHER; note = 2'-O-(2-methoxyethyl) ribonucleotide
  modified_base 15: mod_base = OTHER; note = Locked nucleic acid
  modified_base 16: mod_base = OTHER; note = 2'-O-(2-methoxyethyl) ribonucleotide
  modified_base 17: mod_base = OTHER; note = Locked nucleic acid
  modified_base 18..20: mod_base = OTHER; note = 2'-O-(2-methoxyethyl) ribonucleotide
  modified_base 13: mod_base = OTHER; note = 5-methyl cytidine
  modified_base 16: mod_base = OTHER; note = 5-methyl cytidine
  modified_base 19..20: mod_base = OTHER; note = 5-methyl cytidine
tgatatagagatctgcagcc

SEQ ID NO: 376 - RNA, 20 nt, synthetic construct
  source 1..20: mol_type = other RNA
  modified_base 1..20: mod_base = OTHER; note = Phosphorothioate linkage
  modified_base 1..2: mod_base = OTHER; note = 2'-O-(2-methoxyethyl) ribonucleotide
  modified_base 3: mod_base = OTHER; note = Locked nucleic acid
  modified_base 4..5: mod_base = OTHER; note = 2'-O-(2-methoxyethyl) ribonucleotide
  modified_base 6: mod_base = OTHER; note = Locked nucleic acid
  modified_base 7..8: mod_base = OTHER; note = 2'-O-(2-methoxyethyl) ribonucleotide
  modified_base 9: mod_base = OTHER; note = Locked nucleic acid
  modified_base 10..11: mod_base = OTHER; note = 2'-O-(2-methoxyethyl) ribonucleotide
  modified_base 12: mod_base = OTHER; note = Locked nucleic acid
  modified_base 13..14: mod_base = OTHER; note = 2'-O-(2-methoxyethyl) ribonucleotide
  modified_base 15: mod_base = OTHER; note = Locked nucleic acid
  modified_base 16..17: mod_base = OTHER; note = 2'-O-(2-methoxyethyl) ribonucleotide
  modified_base 18: mod_base = OTHER; note = Locked nucleic acid
  modified_base 19..20: mod_base = OTHER; note = 2'-O-(2-methoxyethyl) ribonucleotide
  modified_base 13: mod_base = OTHER; note = 5-methyl cytidine
  modified_base 16: mod_base = OTHER; note = 5-methyl cytidine
  modified_base 19..20: mod_base = OTHER; note = 5-methyl cytidine
tgatatagagatctgcagcc

SEQ ID NO: 377 - RNA, 20 nt, synthetic construct
  source 1..20: mol_type = other RNA
  modified_base 1..20: mod_base = OTHER; note = Phosphorothioate linkage
  modified_base 1..4: mod_base = OTHER; note = 2'-O-(2-methoxyethyl) ribonucleotide
  modified_base 5: mod_base = OTHER; note = Locked nucleic acid
  modified_base 6..8: mod_base = OTHER; note = 2'-O-(2-methoxyethyl) ribonucleotide
  modified_base 9: mod_base = OTHER; note = Locked nucleic acid
  modified_base 10..12: mod_base = OTHER; note = 2'-O-(2-methoxyethyl) ribonucleotide
  modified_base 13: mod_base = OTHER; note = Locked nucleic acid
  modified_base 14..16: mod_base = OTHER; note = 2'-O-(2-methoxyethyl) ribonucleotide
  modified_base 17: mod_base = OTHER; note = Locked nucleic acid
  modified_base 18..20: mod_base = OTHER; note = 2'-O-(2-methoxyethyl) ribonucleotide
  modified_base 13: mod_base = OTHER; note = 5-methyl cytidine
  modified_base 16: mod_base = OTHER; note = 5-methyl cytidine
  modified_base 19..20: mod_base = OTHER; note = 5-methyl cytidine
tgatatagagatctgcagcc

SEQ ID NO: 378 - RNA, 20 nt, synthetic construct
  source 1..20: mol_type = other RNA
  modified_base 1..20: mod_base = OTHER; note = Phosphorothioate linkage
  modified_base 1..3: mod_base = OTHER; note = 2'-O-(2-methoxyethyl) ribonucleotide
  modified_base 4: mod_base = OTHER; note = Locked nucleic acid
  modified_base 5..7: mod_base = OTHER; note = 2'-O-(2-methoxyethyl) ribonucleotide
  modified_base 8: mod_base = OTHER; note = Locked nucleic acid
  modified_base 9..11: mod_base = OTHER; note = 2'-O-(2-methoxyethyl) ribonucleotide
  modified_base 12: mod_base = OTHER; note = Locked nucleic acid
  modified_base 13..15: mod_base = OTHER; note = 2'-O-(2-methoxyethyl) ribonucleotide
  modified_base 16: mod_base = OTHER; note = Locked nucleic acid
  modified_base 17..20: mod_base = OTHER; note = 2'-O-(2-methoxyethyl) ribonucleotide
  modified_base 13: mod_base = OTHER; note = 5-methyl cytidine
  modified_base 16: mod_base = OTHER; note = 5-methyl cytidine
  modified_base 19..20: mod_base = OTHER; note = 5-methyl cytidine
tgatatagagatctgcagcc

SEQ ID NO: 379 - RNA, 20 nt, synthetic construct
  source 1..20: mol_type = other RNA
  modified_base 1..20: mod_base = OTHER; note = Phosphorothioate linkage
  modified_base 1..5: mod_base = OTHER; note = 2'-O-(2-methoxyethyl) ribonucleotide
  modified_base 6: mod_base = OTHER; note = Locked nucleic acid
  modified_base 7..10: mod_base = OTHER; note = 2'-O-(2-methoxyethyl) ribonucleotide
  modified_base 11: mod_base = OTHER; note = Locked nucleic acid
  modified_base 12..15: mod_base = OTHER; note = 2'-O-(2-methoxyethyl) ribonucleotide
  modified_base 16: mod_base = OTHER; note = Locked nucleic acid
  modified_base 17..20: mod_base = OTHER; note = 2'-O-(2-methoxyethyl) ribonucleotide
  modified_base 13: mod_base = OTHER; note = 5-methyl cytidine
  modified_base 16: mod_base = OTHER; note = 5-methyl cytidine
  modified_base 19..20: mod_base = OTHER; note = 5-methyl cytidine
tgatatagagatctgcagcc

SEQ ID NO: 380 - RNA, 20 nt, synthetic construct
  source 1..20: mol_type = other RNA
  modified_base 1..20: mod_base = OTHER; note = Phosphorothioate linkage
  modified_base 1..4: mod_base = OTHER; note = 2'-O-(2-methoxyethyl) ribonucleotide
  modified_base 5: mod_base = OTHER; note = Locked nucleic acid
  modified_base 6..9: mod_base = OTHER; note = 2'-O-(2-methoxyethyl) ribonucleotide
  modified_base 10: mod_base = OTHER; note = Locked nucleic acid
  modified_base 11..14: mod_base = OTHER; note = 2'-O-(2-methoxyethyl) ribonucleotide
  modified_base 15: mod_base = OTHER; note = Locked nucleic acid
  modified_base 16..20: mod_base = OTHER; note = 2'-O-(2-methoxyethyl) ribonucleotide
  modified_base 13: mod_base = OTHER; note = 5-methyl cytidine
  modified_base 16: mod_base = OTHER; note = 5-methyl cytidine
  modified_base 19..20: mod_base = OTHER; note = 5-methyl cytidine
tgatatagagatctgcagcc

SEQ ID NO: 381 - RNA, 20 nt, synthetic construct
  source 1..20: mol_type = other RNA
  modified_base 1..20: mod_base = OTHER; note = Phosphorothioate linkage
  modified_base 1..20: mod_base = OTHER; note = 2'-O-(2-methoxyethyl) ribonucleotide
  modified_base 2: mod_base = OTHER; note = 5-methyl cytidine
  modified_base 7: mod_base = OTHER; note = 5-methyl cytidine
  modified_base 9..10: mod_base = OTHER; note = 5-methyl cytidine
  modified_base 14..16: mod_base = OTHER; note = 5-methyl cytidine
tctaaacgccaaacccttga

SEQ ID NO: 382 - RNA, 20 nt, synthetic construct
  source 1..20: mol_type = other RNA
  modified_base 1..20: mod_base = OTHER; note = Phosphorothioate linkage
  modified_base 1..20: mod_base = OTHER; note = 2'-O-(2-methoxyethyl) ribonucleotide
  modified_base 4: mod_base = OTHER; note = 5-methyl cytidine
  modified_base 9: mod_base = OTHER; note = 5-methyl cytidine
  modified_base 11..12: mod_base = OTHER; note = 5-methyl cytidine
  modified_base 16..18: mod_base = OTHER; note = 5-methyl cytidine
attctaaacgccaaaccctt

SEQ ID NO: 383 - RNA, 20 nt, synthetic construct
  source 1..20: mol_type = other RNA
  modified_base 1..20: mod_base = OTHER; note = Phosphorothioate linkage
  modified_base 1..20: mod_base = OTHER; note = 2'-O-(2-methoxyethyl) ribonucleotide
  modified_base 6: mod_base = OTHER; note = 5-methyl cytidine
  modified_base 11: mod_base = OTHER; note = 5-methyl cytidine
  modified_base 13..14: mod_base = OTHER; note = 5-methyl cytidine
  modified_base 18..20: mod_base = OTHER; note = 5-methyl cytidine
aaattctaaacgccaaaccc

SEQ ID NO: 384 - RNA, 20 nt, synthetic construct
  source 1..20: mol_type = other RNA
  modified_base 1..20: mod_base = OTHER; note = Phosphorothioate linkage
  modified_base 1..20: mod_base = OTHER; note = 2'-O-(2-methoxyethyl) ribonucleotide
  modified_base 2..3: mod_base = OTHER; note = 5-methyl cytidine
  modified_base 8: mod_base = OTHER; note = 5-methyl cytidine
  modified_base 19: mod_base = OTHER; note = 5-methyl cytidine
gccatagctatgaaaattct

SEQ ID NO: 385 - RNA, 20 nt, synthetic construct
  source 1..20: mol_type = other RNA
  modified_base 1..20: mod_base = OTHER; note = Phosphorothioate linkage
  modified_base 1..20: mod_base = OTHER; note = 2'-O-(2-methoxyethyl) ribonucleotide
  modified_base 15..16: mod_base = OTHER; note = 5-methyl cytidine
gaaggtagttttagccatag

SEQ ID NO: 386 - RNA, 20 nt, synthetic construct
  source 1..20: mol_type = other RNA
  modified_base 1..20: mod_base = OTHER; note = Phosphorothioate linkage
  modified_base 1..20: mod_base = OTHER; note = 2'-O-(2-methoxyethyl) ribonucleotide
  modified_base 17..18: mod_base = OTHER; note = 5-methyl cytidine
tggaaggtagttttagccat

SEQ ID NO: 387 - RNA, 20 nt, synthetic construct
  source 1..20: mol_type = other RNA
  modified_base 1..20: mod_base = OTHER; note = Phosphorothioate linkage
  modified_base 1..20: mod_base = OTHER; note = 2'-O-(2-methoxyethyl) ribonucleotide
  modified_base 19..20: mod_base = OTHER; note = 5-methyl cytidine
tatggaaggtagttttagcc

SEQ ID NO: 388 - RNA, 20 nt, synthetic construct
  source 1..20: mol_type = other RNA
  modified_base 1..20: mod_base = OTHER; note = Phosphorothioate linkage
  modified_base 1..20: mod_base = OTHER; note = 2'-O-(2-methoxyethyl) ribonucleotide
tggattaatatggaaggtag

SEQ ID NO: 389 - RNA, 20 nt, synthetic construct
  source 1..20: mol_type = other RNA
  modified_base 1..20: mod_base = OTHER; note = Phosphorothioate linkage
  modified_base 1..20: mod_base = OTHER; note = 2'-O-(2-methoxyethyl) ribonucleotide
  modified_base 1: mod_base = OTHER; note = 5-methyl cytidine
cgtggattaatatggaaggt

SEQ ID NO: 390 - RNA, 20 nt, synthetic construct
  source 1..20: mol_type = other RNA
  modified_base 1..20: mod_base = OTHER; note = Phosphorothioate linkage
  modified_base 1..20: mod_base = OTHER; note = 2'-O-(2-methoxyethyl) ribonucleotide
  modified_base 3: mod_base = OTHER; note = 5-methyl cytidine
agcgtggattaatatggaag

SEQ ID NO: 391 - RNA, 20 nt, synthetic construct
  source 1..20: mol_type = other RNA
  modified_base 1..20: mod_base = OTHER; note = Phosphorothioate linkage
  modified_base 1..20: mod_base = OTHER; note = 2'-O-(2-methoxyethyl) ribonucleotide
  modified_base 2: mod_base = OTHER; note = 5-methyl cytidine
  modified_base 5: mod_base = OTHER; note = 5-methyl cytidine
acagcgtggattaatatgga

SEQ ID NO: 392 - RNA, 20 nt, synthetic construct
  source 1..20: mol_type = other RNA
  modified_base 1..20: mod_base = OTHER; note = Phosphorothioate linkage
  modified_base 1..20: mod_base = OTHER; note = 2'-O-(2-methoxyethyl) ribonucleotide
  modified_base 4: mod_base = OTHER; note = 5-methyl cytidine
  modified_base 7: mod_base = OTHER; note = 5-methyl cytidine
ggacagcgtggattaatatg

SEQ ID NO: 393 - DNA, 20 bp, synthetic construct
  source 1..20: mol_type = other DNA
  modified_base 1..20: mod_base = OTHER; note = Phosphorothioate linkage
  modified_base 1..5: mod_base = OTHER; note = 2'-O-(2-methoxyethyl) ribonucleotide
  misc_feature 6..15: note = DNA
  modified_base 16..20: mod_base = OTHER; note = 2'-O-(2-methoxyethyl) ribonucleotide
  modified_base 6: mod_base = OTHER; note = 5-methyl cytidine
  modified_base 9: mod_base = OTHER; note = 5-methyl cytidine
tgggacagcgtggattaata

SEQ ID NO: 394 - RNA, 20 nt, synthetic construct
  source 1..20: mol_type = other RNA
  modified_base 1..20: mod_base = OTHER; note = Phosphorothioate linkage
  modified_base 1..20: mod_base = OTHER; note = 2'-O-(2-methoxyethyl) ribonucleotide
  modified_base 4..5: mod_base = OTHER; note = 5-methyl cytidine
  modified_base 8: mod_base = OTHER; note = 5-methyl cytidine
  modified_base 13..17: mod_base = OTHER; note = 5-methyl cytidine
  modified_base 20: mod_base = OTHER; note = 5-methyl cytidine
tttccagcatgtcccccagc

SEQ ID NO: 395 - RNA, 20 nt, synthetic construct
  source 1..20: mol_type = other RNA
  modified_base 1..20: mod_base = OTHER; note = Phosphorothioate linkage
  modified_base 1..20: mod_base = OTHER; note = 2'-O-(2-methoxyethyl) ribonucleotide
  modified_base 2: mod_base = OTHER; note = 5-methyl cytidine
  modified_base 6..7: mod_base = OTHER; note = 5-methyl cytidine
  modified_base 10: mod_base = OTHER; note = 5-methyl cytidine
  modified_base 15..19: mod_base = OTHER; note = 5-methyl cytidine
actttccagcatgtccccca

SEQ ID NO: 396 - RNA, 20 nt, synthetic construct
  source 1..20: mol_type = other RNA
  modified_base 1..20: mod_base = OTHER; note = Phosphorothioate linkage
  modified_base 1..20: mod_base = OTHER; note = 2'-O-(2-methoxyethyl) ribonucleotide
  modified_base 4: mod_base = OTHER; note = 5-methyl cytidine
  modified_base 8..9: mod_base = OTHER; note = 5-methyl cytidine
  modified_base 12: mod_base = OTHER; note = 5-methyl cytidine
  modified_base 17..20: mod_base = OTHER; note = 5-methyl cytidine
agactttccagcatgtcccc

SEQ ID NO: 397 - DNA, 20 bp, synthetic construct
  source 1..20: mol_type = other DNA
  modified_base 1..20: mod_base = OTHER; note = Phosphorothioate linkage
  modified_base 1..5: mod_base = OTHER; note = 2'-O-(2-methoxyethyl) ribonucleotide
  misc_feature 6..8: note = DNA
  modified_base 9: mod_base = OTHER; note = 2'-O-(2-methoxyethyl) ribonucleotide
  misc_feature 10..11: note = DNA
  modified_base 12: mod_base = OTHER; note = 2'-O-(2-methoxyethyl) ribonucleotide
  misc_feature 13..15: note = DNA
  modified_base 16..20: mod_base = OTHER; note = 2'-O-(2-methoxyethyl) ribonucleotide
  modified_base 6: mod_base = OTHER; note = 5-methyl cytidine
  modified_base 9: mod_base = OTHER; note = 5-methyl cytidine
tgggacagcgtggattaata

SEQ ID NO: 398 - DNA, 20 bp, synthetic construct
  source 1..20: mol_type = other DNA
  modified_base 1..20: mod_base = OTHER; note = Phosphorothioate linkage
  modified_base 1..5: mod_base = OTHER; note = 2'-O-(2-methoxyethyl) ribonucleotide
  modified_base 6: mod_base = OTHER; note = Locked nucleic acid
  misc_feature 7..8: note = DNA
  modified_base 9: mod_base = OTHER; note = Locked nucleic acid
  misc_feature 10..11: note = DNA
  modified_base 12: mod_base = OTHER; note = Locked nucleic acid
  misc_feature 13..14: note = DNA
  modified_base 15: mod_base = OTHER; note = Locked nucleic acid
  modified_base 16..20: mod_base = OTHER; note = 2'-O-(2-methoxyethyl) ribonucleotide
  modified_base 6: mod_base = OTHER; note = 5-methyl cytidine
  modified_base 9: mod_base = OTHER; note = 5-methyl cytidine
tgggacagcgtggattaata

SEQ ID NO: 399 - DNA, 20 bp, synthetic construct
  source 1..20: mol_type = other DNA
  modified_base 1..20: mod_base = OTHER; note = Phosphorothioate linkage
  modified_base 1..3: mod_base = OTHER; note = 2'-O-(2-methoxyethyl) ribonucleotide
  modified_base 4: mod_base = OTHER; note = Locked nucleic acid
  modified_base 5: mod_base = OTHER; note = 2'-O-(2-methoxyethyl) ribonucleotide
  misc_feature 6..7: note = DNA
  modified_base 8: mod_base = OTHER; note = Locked nucleic acid
  misc_feature 9..11: note = DNA
  modified_base 12: mod_base = OTHER; note = Locked nucleic acid
  misc_feature 13..15: note = DNA
  modified_base 16: mod_base = OTHER; note = Locked nucleic acid
  modified_base 17..20: mod_base = OTHER; note = 2'-O-(2-methoxyethyl) ribonucleotide
  modified_base 6: mod_base = OTHER; note = 5-methyl cytidine
  modified_base 9: mod_base = OTHER; note = 5-methyl cytidine
tgggacagcgtggattaata

SEQ ID NO: 400 - DNA, 20 bp, synthetic construct
  source 1..20: mol_type = other DNA
  modified_base 1..20: mod_base = OTHER; note = Phosphorothioate linkage
  modified_base 1..4: mod_base = OTHER; note = 2'-O-(2-methoxyethyl) ribonucleotide
  modified_base 5: mod_base = OTHER; note = Locked nucleic acid
  misc_feature 6..8: note = DNA
  modified_base 9: mod_base = OTHER; note = Locked nucleic acid
  misc_feature 10..12: note = DNA
  modified_base 13: mod_base = OTHER; note = Locked nucleic acid
  misc_feature 14..15: note = DNA
  modified_base 16: mod_base = OTHER; note = 2'-O-(2-methoxyethyl) ribonucleotide
  modified_base 17: mod_base = OTHER; note = Locked nucleic acid
  modified_base 18..20: mod_base = OTHER; note = 2'-O-(2-methoxyethyl) ribonucleotide
  modified_base 6: mod_base = OTHER; note = 5-methyl cytidine
  modified_base 9: mod_base = OTHER; note = 5-methyl cytidine
tgggacagcgtggattaata

SEQ ID NO: 401 - RNA, 20 nt, synthetic construct
  source 1..20: mol_type = other RNA
  modified_base 1..20: mod_base = OTHER; note = Phosphorothioate linkage
  modified_base 1..5: mod_base = OTHER; note = 2'-O-(2-methoxyethyl) ribonucleotide
  modified_base 6: mod_base = OTHER; note = Locked nucleic acid
  modified_base 7..8: mod_base = OTHER; note = 2'-O-(2-methoxyethyl) ribonucleotide
  modified_base 9: mod_base = OTHER; note = Locked nucleic acid
  modified_base 10..11: mod_base = OTHER; note = 2'-O-(2-methoxyethyl) ribonucleotide
  modified_base 12: mod_base = OTHER; note = Locked nucleic acid
  modified_base 13..14: mod_base = OTHER; note = 2'-O-(2-methoxyethyl) ribonucleotide
  modified_base 15: mod_base = OTHER; note = Locked nucleic acid
  modified_base 16..20: mod_base = OTHER; note = 2'-O-(2-methoxyethyl) ribonucleotide
  modified_base 6: mod_base = OTHER; note = 5-methyl cytidine
  modified_base 9: mod_base = OTHER; note = 5-methyl cytidine
tgggacagcgtggattaata

SEQ ID NO: 402 - RNA, 20 nt, synthetic construct
  source 1..20: mol_type = other RNA
  modified_base 1..20: mod_base = OTHER; note = Phosphorothioate linkage
  modified_base 1..3: mod_base = OTHER; note = 2'-O-(2-methoxyethyl) ribonucleotide
  modified_base 4: mod_base = OTHER; note = Locked nucleic acid
  modified_base 5: mod_base = OTHER; note = 2'-O-(2-methoxyethyl) ribonucleotide
  modified_base 6: mod_base = OTHER; note = Locked nucleic acid
  modified_base 7: mod_base = OTHER; note = 2'-O-(2-methoxyethyl) ribonucleotide
  modified_base 8: mod_base = OTHER; note = Locked nucleic acid
  modified_base 9: mod_base = OTHER; note = 2'-O-(2-methoxyethyl) ribonucleotide
  modified_base 10: mod_base = OTHER; note = Locked nucleic acid
  modified_base 11: mod_base = OTHER; note = 2'-O-(2-methoxyethyl) ribonucleotide
  modified_base 12: mod_base = OTHER; note = Locked nucleic acid
  modified_base 13: mod_base = OTHER; note = 2'-O-(2-methoxyethyl) ribonucleotide
  modified_base 14: mod_base = OTHER; note = Locked nucleic acid
  modified_base 15: mod_base = OTHER; note = 2'-O-(2-methoxyethyl) ribonucleotide
  modified_base 16: mod_base = OTHER; note = Locked nucleic acid
  modified_base 17: mod_base = OTHER; note = 2'-O-(2-methoxyethyl) ribonucleotide
  modified_base 18: mod_base = OTHER; note = Locked nucleic acid
  modified_base 19..20: mod_base = OTHER; note = 2'-O-(2-methoxyethyl) ribonucleotide
  modified_base 6: mod_base = OTHER; note = 5-methyl cytidine
  modified_base 9: mod_base = OTHER; note = 5-methyl cytidine
tgggacagcgtggattaata

SEQ ID NO: 403 - RNA, 20 nt, synthetic construct
  source 1..20: mol_type = other RNA
  modified_base 1..20: mod_base = OTHER; note = Phosphorothioate linkage
  modified_base 1..2: mod_base = OTHER; note = 2'-O-(2-methoxyethyl) ribonucleotide
  modified_base 3: mod_base = OTHER; note = Locked nucleic acid
  modified_base 4: mod_base = OTHER; note = 2'-O-(2-methoxyethyl) ribonucleotide
  modified_base 5: mod_base = OTHER; note = Locked nucleic acid
  modified_base 6: mod_base = OTHER; note = 2'-O-(2-methoxyethyl) ribonucleotide
  modified_base 7: mod_base = OTHER; note = Locked nucleic acid
  modified_base 8: mod_base = OTHER; note = 2'-O-(2-methoxyethyl) ribonucleotide
  modified_base 9: mod_base = OTHER; note = Locked nucleic acid
  modified_base 10: mod_base = OTHER; note = 2'-O-(2-methoxyethyl) ribonucleotide
  modified_base 11: mod_base = OTHER; note = Locked nucleic acid
  modified_base 12: mod_base = OTHER; note = 2'-O-(2-methoxyethyl) ribonucleotide
  modified_base 13: mod_base = OTHER; note = Locked nucleic acid
  modified_base 14: mod_base = OTHER; note = 2'-O-(2-methoxyethyl) ribonucleotide
  modified_base 15: mod_base = OTHER; note = Locked nucleic acid
  modified_base 16: mod_base = OTHER; note = 2'-O-(2-methoxyethyl) ribonucleotide
  modified_base 17: mod_base = OTHER; note = Locked nucleic acid
  modified_base 18..20: mod_base = OTHER; note = 2'-O-(2-methoxyethyl) ribonucleotide
  modified_base 6: mod_base = OTHER; note = 5-methyl cytidine
  modified_base 9: mod_base = OTHER; note = 5-methyl cytidine
tgggacagcgtggattaata

SEQ ID NO: 404 - RNA, 20 nt, synthetic construct
  source 1..20: mol_type = other RNA
  modified_base 1..20: mod_base = OTHER; note = Phosphorothioate linkage
  modified_base 1..2: mod_base = OTHER; note = 2'-O-(2-methoxyethyl) ribonucleotide
  modified_base 3: mod_base = OTHER; note = Locked nucleic acid
  modified_base 4..5: mod_base = OTHER; note = 2'-O-(2-methoxyethyl) ribonucleotide
  modified_base 6: mod_base = OTHER; note = Locked nucleic acid
  modified_base 7..8: mod_base = OTHER; note = 2'-O-(2-methoxyethyl) ribonucleotide
  modified_base 9: mod_base = OTHER; note = Locked nucleic acid
  modified_base 10..11: mod_base = OTHER; note = 2'-O-(2-methoxyethyl) ribonucleotide
  modified_base 12: mod_base = OTHER; note = Locked nucleic acid
  modified_base 13..14: mod_base = OTHER; note = 2'-O-(2-methoxyethyl) ribonucleotide
  modified_base 15: mod_base = OTHER; note = Locked nucleic acid
  modified_base 16..17: mod_base = OTHER; note = 2'-O-(2-methoxyethyl) ribonucleotide
  modified_base 18: mod_base = OTHER; note = Locked nucleic acid
  modified_base 19..20: mod_base = OTHER; note = 2'-O-(2-methoxyethyl) ribonucleotide
  modified_base 6: mod_base = OTHER; note = 5-methyl cytidine
  modified_base 9: mod_base = OTHER; note = 5-methyl cytidine
tgggacagcgtggattaata

SEQ ID NO: 405 - RNA, 20 nt, synthetic construct
  source 1..20: mol_type = other RNA
  modified_base 1..20: mod_base = OTHER; note = Phosphorothioate linkage
  modified_base 1..4: mod_base = OTHER; note = 2'-O-(2-methoxyethyl) ribonucleotide
  modified_base 5: mod_base = OTHER; note = Locked nucleic acid
  modified_base 6..8: mod_base = OTHER; note = 2'-O-(2-methoxyethyl) ribonucleotide
  modified_base 9: mod_base = OTHER; note = Locked nucleic acid
  modified_base 10..12: mod_base = OTHER; note = 2'-O-(2-methoxyethyl) ribonucleotide
  modified_base 13: mod_base = OTHER; note = Locked nucleic acid
  modified_base 14..16: mod_base = OTHER; note = 2'-O-(2-methoxyethyl) ribonucleotide
  modified_base 17: mod_base = OTHER; note = Locked nucleic acid
  modified_base 18..20: mod_base = OTHER; note = 2'-O-(2-methoxyethyl) ribonucleotide
  modified_base 6: mod_base = OTHER; note = 5-methyl cytidine
  modified_base 9: mod_base = OTHER; note = 5-methyl cytidine
tgggacagcgtggattaata

SEQ ID NO: 406 - RNA, 20 nt, synthetic construct
  source 1..20: mol_type = other RNA
  modified_base 1..20: mod_base = OTHER; note = Phosphorothioate linkage
  modified_base 1..3: mod_base = OTHER; note = 2'-O-(2-methoxyethyl) ribonucleotide
  modified_base 4: mod_base = OTHER; note = Locked nucleic acid
  modified_base 5..7: mod_base = OTHER; note = 2'-O-(2-methoxyethyl) ribonucleotide
  modified_base 8: mod_base = OTHER; note = Locked nucleic acid
  modified_base 9..11: mod_base = OTHER; note = 2'-O-(2-methoxyethyl) ribonucleotide
  modified_base 12: mod_base = OTHER; note = Locked nucleic acid
  modified_base 13..15: mod_base = OTHER; note = 2'-O-(2-methoxyethyl) ribonucleotide
  modified_base 16: mod_base = OTHER; note = Locked nucleic acid
  modified_base 17..20: mod_base = OTHER; note = 2'-O-(2-methoxyethyl) ribonucleotide
  modified_base 6: mod_base = OTHER; note = 5-methyl cytidine
  modified_base 9: mod_base = OTHER; note = 5-methyl cytidine
tgggacagcgtggattaata

SEQ ID NO: 407 - RNA, 20 nt, synthetic construct
  source 1..20: mol_type = other RNA
  modified_base 1..20: mod_base = OTHER; note = Phosphorothioate linkage
  modified_base 1..5: mod_base = OTHER; note = 2'-O-(2-methoxyethyl) ribonucleotide
  modified_base 6: mod_base = OTHER; note = Locked nucleic acid
  modified_base 7..10: mod_base = OTHER; note = 2'-O-(2-methoxyethyl) ribonucleotide
  modified_base 11: mod_base = OTHER; note = Locked nucleic acid
  modified_base 12..15: mod_base = OTHER; note = 2'-O-(2-methoxyethyl) ribonucleotide
  modified_base 16: mod_base = OTHER; note = Locked nucleic acid
  modified_base 17..20: mod_base = OTHER; note = 2'-O-(2-methoxyethyl) ribonucleotide
  modified_base 6: mod_base = OTHER; note = 5-methyl cytidine
  modified_base 9: mod_base = OTHER; note = 5-methyl cytidine
tgggacagcgtggattaata

SEQ ID NO: 408 - RNA, 20 nt, synthetic construct
  source 1..20: mol_type = other RNA
  modified_base 1..20: mod_base = OTHER; note = Phosphorothioate linkage
  modified_base 1..4: mod_base = OTHER; note = 2'-O-(2-methoxyethyl) ribonucleotide
  modified_base 5: mod_base = OTHER; note = Locked nucleic acid
  modified_base 6..9: mod_base = OTHER; note = 2'-O-(2-methoxyethyl) ribonucleotide
  modified_base 10: mod_base = OTHER; note = Locked nucleic acid
  modified_base 11..14: mod_base = OTHER; note = 2'-O-(2-methoxyethyl) ribonucleotide
  modified_base 15: mod_base = OTHER; note = Locked nucleic acid
  modified_base 16..20: mod_base = OTHER; note = 2'-O-(2-methoxyethyl) ribonucleotide
  modified_base 6: mod_base = OTHER; note = 5-methyl cytidine
  modified_base 9: mod_base = OTHER; note = 5-methyl cytidine
tgggacagcgtggattaata

SEQ ID NO: 409 - DNA, 22 bp, synthetic construct
  source 1..22: mol_type = other DNA
  modified_base 1..22: mod_base = OTHER; note = Phosphorothioate linkage
  modified_base 1..6: mod_base = OTHER; note = 2'-O-(2-methoxyethyl) ribonucleotide
  misc_feature 7..16: note = DNA
  modified_base 17..22: mod_base = OTHER; note = 2'-O-(2-methoxyethyl) ribonucleotide
  modified_base 1: mod_base = OTHER; note = 5-methyl cytidine
  modified_base 7: mod_base = OTHER; note = 5-methyl cytidine
  modified_base 10: mod_base = OTHER; note = 5-methyl cytidine
ctgggacagcgtggattaatat

SEQ ID NO: 410 - RNA, 22 nt, synthetic construct
  source 1..22: mol_type = other RNA
  modified_base 1..22: mod_base = OTHER; note = Phosphorothioate linkage
  modified_base 1..22: mod_base = OTHER; note = 2'-O-(2-methoxyethyl) ribonucleotide
  modified_base 1: mod_base = OTHER; note = 5-methyl cytidine
  modified_base 7: mod_base = OTHER; note = 5-methyl cytidine
  modified_base 10: mod_base = OTHER; note = 5-methyl cytidine
ctgggacagcgtggattaatat

SEQ ID NO: 411 - DNA, 22 bp, synthetic construct
  source 1..22: mol_type = other DNA
  modified_base 1..22: mod_base = OTHER; note = Phosphorothioate linkage
  modified_base 1..5: mod_base = OTHER; note = 2'-O-(2-methoxyethyl) ribonucleotide
  misc_feature 6..8: note = DNA
  modified_base 9: mod_base = OTHER; note = 2'-O-(2-methoxyethyl) ribonucleotide
  misc_feature 10..13: note = DNA
  modified_base 14: mod_base = OTHER; note = 2'-O-(2-methoxyethyl) ribonucleotide
  misc_feature 15..17: note = DNA
  modified_base 18..22: mod_base = OTHER; note = 2'-O-(2-methoxyethyl) ribonucleotide
  modified_base 1: mod_base = OTHER; note = 5-methyl cytidine
  modified_base 7: mod_base = OTHER; note = 5-methyl cytidine
  modified_base 10: mod_base = OTHER; note = 5-methyl cytidine
ctgggacagcgtggattaatat

SEQ ID NO: 412 - DNA, 22 bp, synthetic construct
  source 1..22: mol_type = other DNA
  modified_base 1..22: mod_base = OTHER; note = Phosphorothioate linkage
  modified_base 1..5: mod_base = OTHER; note = 2'-O-(2-methoxyethyl) ribonucleotide
  modified_base 6: mod_base = OTHER; note = Locked nucleic acid
  misc_feature 7..8: note = DNA
  modified_base 9: mod_base = OTHER; note = Locked nucleic acid
  misc_feature 10..13: note = DNA
  modified_base 14: mod_base = OTHER; note = Locked nucleic acid
  misc_feature 15..16: note = DNA
  modified_base 17: mod_base = OTHER; note = Locked nucleic acid
  modified_base 18..22: mod_base = OTHER; note = 2'-O-(2-methoxyethyl) ribonucleotide
  modified_base 1: mod_base = OTHER; note = 5-methyl cytidine
  modified_base 7: mod_base = OTHER; note = 5-methyl cytidine
  modified_base 10: mod_base = OTHER; note = 5-methyl cytidine
ctgggacagcgtggattaatat

SEQ ID NO: 413 - DNA, 24 bp, synthetic construct
  source 1..24: mol_type = other DNA
  modified_base 1..24: mod_base = OTHER; note = Phosphorothioate linkage
  modified_base 1..7: mod_base = OTHER; note = 2'-O-(2-methoxyethyl) ribonucleotide
  misc_feature 8..17: note = DNA
  modified_base 18..24: mod_base = OTHER; note = 2'-O-(2-methoxyethyl) ribonucleotide
  modified_base 2: mod_base = OTHER; note = 5-methyl cytidine
  modified_base 8: mod_base = OTHER; note = 5-methyl cytidine
  modified_base 11: mod_base = OTHER; note = 5-methyl cytidine
gctgggacagcgtggattaatatg

SEQ ID NO: 414 - RNA, 24 nt, synthetic construct
  source 1..24: mol_type = other RNA
  modified_base 1..24: mod_base = OTHER; note = Phosphorothioate linkage
  modified_base 1..24: mod_base = OTHER; note = 2'-O-(2-methoxyethyl) ribonucleotide
  modified_base 2: mod_base = OTHER; note = 5-methyl cytidine
  modified_base 8: mod_base = OTHER; note = 5-methyl cytidine
  modified_base 11: mod_base = OTHER; note = 5-methyl cytidine
gctgggacagcgtggattaatatg

SEQ ID NO: 415 - DNA, 24 bp, synthetic construct
  source 1..24: mol_type = other DNA
  modified_base 1..24: mod_base = OTHER; note = Phosphorothioate linkage
  modified_base 1..5: mod_base = OTHER; note = 2'-O-(2-methoxyethyl) ribonucleotide
  misc_feature 6..7: note = DNA
  modified_base 8: mod_base = OTHER; note = 2'-O-(2-methoxyethyl) ribonucleotide
  misc_feature 9..10: note = DNA
  modified_base 11: mod_base = OTHER; note = 2'-O-(2-methoxyethyl) ribonucleotide
  misc_feature 12..13: note = DNA
  modified_base 14: mod_base = OTHER; note = 2'-O-(2-methoxyethyl) ribonucleotide
  misc_feature 15..16: note = DNA
  modified_base 17: mod_base = OTHER; note = 2'-O-(2-methoxyethyl) ribonucleotide
  misc_feature 18..19: note = DNA
  modified_base 20..24: mod_base = OTHER; note = 2'-O-(2-methoxyethyl) ribonucleotide
  modified_base 2: mod_base = OTHER; note = 5-methyl cytidine
  modified_base 8: mod_base = OTHER; note = 5-methyl cytidine
  modified_base 11: mod_base = OTHER; note = 5-methyl cytidine
gctgggacagcgtggattaatatg

SEQ ID NO: 416 - DNA, 24 bp, synthetic construct
  source 1..24: mol_type = other DNA
  modified_base 1..24: mod_base = OTHER; note = Phosphorothioate linkage
  modified_base 1..5: mod_base = OTHER; note = 2'-O-(2-methoxyethyl) ribonucleotide
  misc_feature 6..7: note = DNA
  modified_base 8: mod_base = OTHER; note = Locked nucleic acid
  misc_feature 9..10: note = DNA
  modified_base 11: mod_base = OTHER; note = Locked nucleic acid
  misc_feature 12..13: note = DNA
  modified_base 14: mod_base = OTHER; note = Locked nucleic acid
  misc_feature 15..16: note = DNA
  modified_base 17: mod_base = OTHER; note = Locked nucleic acid
  misc_feature 18..19: note = DNA
  modified_base 20..24: mod_base = OTHER; note = 2'-O-(2-methoxyethyl) ribonucleotide
  modified_base 2: mod_base = OTHER; note = 5-methyl cytidine
  modified_base 8: mod_base = OTHER; note = 5-methyl cytidine
  modified_base 11: mod_base = OTHER; note = 5-methyl cytidine
gctgggacagcgtggattaatatg

SEQ ID NO: 417 - RNA, 20 nt, synthetic construct
  source 1..20: mol_type = other RNA
  modified_base 1..20: mod_base = OTHER; note = Phosphorothioate linkage
  modified_base 1..20: mod_base = OTHER; note = 2'-O-(2-methoxyethyl) ribonucleotide
  modified_base 11: mod_base = OTHER; note = 5-methyl cytidine
  modified_base 15: mod_base = OTHER; note = 5-methyl cytidine
  modified_base 17..18: mod_base = OTHER; note = 5-methyl cytidine
  modified_base 20: mod_base = OTHER; note = 5-methyl cytidine
gatgaaaaggcagactcctc

SEQ ID NO: 418 - RNA, 20 nt, synthetic construct
  source 1..20: mol_type = other RNA
  modified_base 1..20: mod_base = OTHER; note = Phosphorothioate linkage
  modified_base 1..20: mod_base = OTHER; note = 2'-O-(2-methoxyethyl) ribonucleotide
ggaatgaagttggaaaagat

SEQ ID NO: 419 - RNA, 20 nt, synthetic construct
  source 1..20: mol_type = other RNA
  modified_base 1..20: mod_base = OTHER; note = Phosphorothioate linkage
  modified_base 1..20: mod_base = OTHER; note = 2'-O-(2-methoxyethyl) ribonucleotide
  modified_base 9..10: mod_base = OTHER; note = 5-methyl cytidine
  modified_base 13: mod_base = OTHER; note = 5-methyl cytidine
agatagttcctgcaatggga

SEQ ID NO: 420 - RNA, 20 nt, synthetic construct
  source 1..20: mol_type = other RNA
  modified_base 1..20: mod_base = OTHER; note = Phosphorothioate linkage
  modified_base 1..20: mod_base = OTHER; note = 2'-O-(2-methoxyethyl) ribonucleotide
  modified_base 2: mod_base = OTHER; note = 5-methyl cytidine
  modified_base 6: mod_base = OTHER; note = 5-methyl cytidine
  modified_base 10: mod_base = OTHER; note = 5-methyl cytidine
  modified_base 19..20: mod_base = OTHER; note = 5-methyl cytidine
tcagacaggcagatagttcc

SEQ ID NO: 421 - RNA, 20 nt, synthetic construct
  source 1..20: mol_type = other RNA
  modified_base 1..20: mod_base = OTHER; note = Phosphorothioate linkage
  modified_base 1..20: mod_base = OTHER; note = 2'-O-(2-methoxyethyl) ribonucleotide
  modified_base 7..9: mod_base = OTHER; note = 5-methyl cytidine
  modified_base 12: mod_base = OTHER; note = 5-methyl cytidine
  modified_base 14: mod_base = OTHER; note = 5-methyl cytidine
ggaatgcccaactctgtagt

SEQ ID NO: 422 - RNA, 20 nt, synthetic construct
  source 1..20: mol_type = other RNA
  modified_base 1..20: mod_base = OTHER; note = Phosphorothioate linkage
  modified_base 1..20: mod_base = OTHER; note = 2'-O-(2-methoxyethyl) ribonucleotide
  modified_base 3: mod_base = OTHER; note = 5-methyl cytidine
  modified_base 5: mod_base = OTHER; note = 5-methyl cytidine
  modified_base 11..14: mod_base = OTHER; note = 5-methyl cytidine
  modified_base 16: mod_base = OTHER; note = 5-methyl cytidine
ggcacaagttccccactagt

SEQ ID NO: 423 - RNA, 20 nt, synthetic construct
  source 1..20: mol_type = other RNA
  modified_base 1..20: mod_base = OTHER; note = Phosphorothioate linkage
  modified_base 1..20: mod_base = OTHER; note = 2'-O-(2-methoxyethyl) ribonucleotide
  modified_base 5: mod_base = OTHER; note = 5-methyl cytidine
  modified_base 13: mod_base = OTHER; note = 5-methyl cytidine
  modified_base 15: mod_base = OTHER; note = 5-methyl cytidine
tgtacagtaaggcacaagtt

SEQ ID NO: 424 - RNA, 20 nt, synthetic construct
  source 1..20: mol_type = other RNA
  modified_base 1..20: mod_base = OTHER; note = Phosphorothioate linkage
  modified_base 1..20: mod_base = OTHER; note = 2'-O-(2-methoxyethyl) ribonucleotide
  modified_base 7: mod_base = OTHER; note = 5-methyl cytidine
  modified_base 9: mod_base = OTHER; note = 5-methyl cytidine
  modified_base 11: mod_base = OTHER; note = 5-methyl cytidine
  modified_base 16: mod_base = OTHER; note = 5-methyl cytidine
gaaaaacacactgtacagta

SEQ ID NO: 425 - RNA, 20 nt, synthetic construct
  source 1..20: mol_type = other RNA
  modified_base 1..20: mod_base = OTHER; note = Phosphorothioate linkage
  modified_base 1..20: mod_base = OTHER; note = 2'-O-(2-methoxyethyl) ribonucleotide
  modified_base 2: mod_base = OTHER; note = 5-methyl cytidine
  modified_base 4..7: mod_base = OTHER; note = 5-methyl cytidine
  modified_base 9..10: mod_base = OTHER; note = 5-methyl cytidine
  modified_base 13: mod_base = OTHER; note = 5-methyl cytidine
  modified_base 15: mod_base = OTHER; note = 5-methyl cytidine
  modified_base 17: mod_base = OTHER; note = 5-methyl cytidine
gcaccccgccatcacacaag

SEQ ID NO: 426 - RNA, 20 nt, synthetic construct
  source 1..20: mol_type = other RNA
  modified_base 1..20: mod_base = OTHER; note = Phosphorothioate linkage
  modified_base 1..20: mod_base = OTHER; note = 2'-O-(2-methoxyethyl) ribonucleotide
  modified_base 1: mod_base = OTHER; note = 5-methyl cytidine
  modified_base 5: mod_base = OTHER; note = 5-methyl cytidine
ctgacaggtggagtttaggg

SEQ ID NO: 427 - RNA, 20 nt, synthetic construct
  source 1..20: mol_type = other RNA
  modified_base 1..20: mod_base = OTHER; note = Phosphorothioate linkage
  modified_base 1..20: mod_base = OTHER; note = 2'-O-(2-methoxyethyl) ribonucleotide
  modified_base 2: mod_base = OTHER; note = 5-methyl cytidine
  modified_base 12..13: mod_base = OTHER; note = 5-methyl cytidine
  modified_base 18: mod_base = OTHER; note = 5-methyl cytidine
tcgagaagagaccagaactg

SEQ ID NO: 428 - RNA, 20 nt, synthetic construct
  source 1..20: mol_type = other RNA
  modified_base 1..20: mod_base = OTHER; note = Phosphorothioate linkage
  modified_base 1..20: mod_base = OTHER; note = 2'-O-(2-methoxyethyl) ribonucleotide
  modified_base 2: mod_base = OTHER; note = 5-methyl cytidine
  modified_base 4: mod_base = OTHER; note = 5-methyl cytidine
  modified_base 7: mod_base = OTHER; note = 5-methyl cytidine
  modified_base 12: mod_base = OTHER; note = 5-methyl cytidine
  modified_base 14: mod_base = OTHER; note = 5-methyl cytidine
  modified_base 16: mod_base = OTHER; note = 5-methyl cytidine
  modified_base 18: mod_base = OTHER; note = 5-methyl cytidine
gcacagcgtgtctctctcga

SEQ ID NO: 429 - RNA, 20 nt, synthetic construct
  source 1..20: mol_type = other RNA
  modified_base 1..20: mod_base = OTHER; note = Phosphorothioate linkage
  modified_base 1..20: mod_base = OTHER; note = 2'-O-(2-methoxyethyl) ribonucleotide
  modified_base 5: mod_base = OTHER; note = 5-methyl cytidine
  modified_base 9: mod_base = OTHER; note = 5-methyl cytidine
  modified_base 18: mod_base = OTHER; note = 5-methyl cytidine
  modified_base 20: mod_base = OTHER; note = 5-methyl cytidine
gatactgacagagttggcac

SEQ ID NO: 430 - RNA, 20 nt, synthetic construct
  source 1..20: mol_type = other RNA
  modified_base 1..20: mod_base = OTHER; note = Phosphorothioate linkage
  modified_base 1..20: mod_base = OTHER; note = 2'-O-(2-methoxyethyl) ribonucleotide
  modified_base 10: mod_base = OTHER; note = 5-methyl cytidine
  modified_base 16: mod_base = OTHER; note = 5-methyl cytidine
gtttggttacaggttcttgt

SEQ ID NO: 431 - RNA, 20 nt, synthetic construct
  source 1..20: mol_type = other RNA
  modified_base 1..20: mod_base = OTHER; note = Phosphorothioate linkage
  modified_base 1..20: mod_base = OTHER; note = 2'-O-(2-methoxyethyl) ribonucleotide
  modified_base 2..3: mod_base = OTHER; note = 5-methyl cytidine
  modified_base 10: mod_base = OTHER; note = 5-methyl cytidine
  modified_base 15..16: mod_base = OTHER; note = 5-methyl cytidine
gccagaaagctatgccaatt

SEQ ID NO: 432 - RNA, 20 nt, synthetic construct
  source 1..20: mol_type = other RNA
  modified_base 1..20: mod_base = OTHER; note = Phosphorothioate linkage
  modified_base 1..20: mod_base = OTHER; note = 2'-O-(2-methoxyethyl) ribonucleotide
  modified_base 3: mod_base = OTHER; note = 5-methyl cytidine
  modified_base 5..7: mod_base = OTHER; note = 5-methyl cytidine
  modified_base 11: mod_base = OTHER; note = 5-methyl cytidine
  modified_base 20: mod_base = OTHER; note = 5-methyl cytidine
gacaccctgactttaagagc

SEQ ID NO: 433 - RNA, 20 nt, synthetic construct
  source 1..20: mol_type = other RNA
  modified_base 1..20: mod_base = OTHER; note = Phosphorothioate linkage
  modified_base 1..20: mod_base = OTHER; note = 2'-O-(2-methoxyethyl) ribonucleotide
  modified_base 3..4: mod_base = OTHER; note = 5-methyl cytidine
  modified_base 8: mod_base = OTHER; note = 5-methyl cytidine
  modified_base 11: mod_base = OTHER; note = 5-methyl cytidine
  modified_base 16: mod_base = OTHER; note = 5-methyl cytidine
  modified_base 18..20: mod_base = OTHER; note = 5-methyl cytidine
tgccaaacatcaggacaccc

SEQ ID NO: 434 - RNA, 20 nt, synthetic construct
  source 1..20: mol_type = other RNA
  modified_base 1..20: mod_base = OTHER; note = Phosphorothioate linkage
  modified_base 1..20: mod_base = OTHER; note = 2'-O-(2-methoxyethyl) ribonucleotide
  modified_base 4: mod_base = OTHER; note = 5-methyl cytidine
  modified_base 6..7: mod_base = OTHER; note = 5-methyl cytidine
  modified_base 10: mod_base = OTHER; note = 5-methyl cytidine
  modified_base 13..14: mod_base = OTHER; note = 5-methyl cytidine
  modified_base 18: mod_base = OTHER; note = 5-methyl cytidine
ggactcctactgccaaacat

SEQ ID NO: 435 - RNA, 20 nt, synthetic construct
  source 1..20: mol_type = other RNA
  modified_base 1..20: mod_base = OTHER; note = Phosphorothioate linkage
  modified_base 1..20: mod_base = OTHER; note = 2'-O-(2-methoxyethyl) ribonucleotide
  modified_base 5: mod_base = OTHER; note = 5-methyl cytidine
  modified_base 15: mod_base = OTHER; note = 5-methyl cytidine
  modified_base 17..18: mod_base = OTHER; note = 5-methyl cytidine
agagcgtaagaggactccta

SEQ ID NO: 436 - RNA, 20 nt, synthetic construct
  source 1..20: mol_type = other RNA
  modified_base 1..20: mod_base = OTHER; note = Phosphorothioate linkage
  modified_base 1..20: mod_base = OTHER; note = 2'-O-(2-methoxyethyl) ribonucleotide
  modified_base 4: mod_base = OTHER; note = 5-methyl cytidine
  modified_base 10: mod_base = OTHER; note = 5-methyl cytidine
  modified_base 12: mod_base = OTHER; note = 5-methyl cytidine
  modified_base 14: mod_base = OTHER; note = 5-methyl cytidine
  modified_base 16: mod_base = OTHER; note = 5-methyl cytidine
  modified_base 18: mod_base = OTHER; note = 5-methyl cytidine
aagctagaacacgctcgcga

SEQ ID NO: 437 - RNA, 20 nt, synthetic construct
  source 1..20: mol_type = other RNA
  modified_base 1..20: mod_base = OTHER; note = Phosphorothioate linkage
  modified_base 1..20: mod_base = OTHER; note = 2'-O-(2-methoxyethyl) ribonucleotide
  modified_base 6..8: mod_base = OTHER; note = 5-methyl cytidine
  modified_base 16: mod_base = OTHER; note = 5-methyl cytidine
gaagaccctgtagtacaaag

SEQ ID NO: 438 - RNA, 20 nt, synthetic construct
  source 1..20: mol_type = other RNA
  modified_base 1..20: mod_base = OTHER; note = Phosphorothioate linkage
  modified_base 1..20: mod_base = OTHER; note = 2'-O-(2-methoxyethyl) ribonucleotide
  modified_base 1: mod_base = OTHER; note = 5-methyl cytidine
  modified_base 6: mod_base = OTHER; note = 5-methyl cytidine
  modified_base 8: mod_base = OTHER; note = 5-methyl cytidine
  modified_base 19..20: mod_base = OTHER; note = 5-methyl cytidine
cgtgactctaaaagaagacc

SEQ ID NO: 439 - RNA, 20 nt, synthetic construct
  source 1..20: mol_type = other RNA
  modified_base 1..20: mod_base = OTHER; note = Phosphorothioate linkage
  modified_base 1..20: mod_base = OTHER; note = 2'-O-(2-methoxyethyl) ribonucleotide
  modified_base 2: mod_base = OTHER; note = 5-methyl cytidine
  modified_base 4: mod_base = OTHER; note = 5-methyl cytidine
  modified_base 11: mod_base = OTHER; note = 5-methyl cytidine
  modified_base 17: mod_base = OTHER; note = 5-methyl cytidine
  modified_base 19: mod_base = OTHER; note = 5-methyl cytidine
gcacattagactaggtcacg

SEQ ID NO: 440 - RNA, 20 nt, synthetic construct
  source 1..20: mol_type = other RNA
  modified_base 1..20: mod_base = OTHER; note = Phosphorothioate linkage
  modified_base 1..20: mod_base = OTHER; note = 2'-O-(2-methoxyethyl) ribonucleotide
  modified_base 8..9: mod_base = OTHER; note = 5-methyl cytidine
  modified_base 12: mod_base = OTHER; note = 5-methyl cytidine
  modified_base 14: mod_base = OTHER; note = 5-methyl cytidine
gagagagcctgcacattaga

SEQ ID NO: 441 - RNA, 20 nt, synthetic construct
  source 1..20: mol_type = other RNA
  modified_base 1..20: mod_base = OTHER; note = Phosphorothioate linkage
  modified_base 1..20: mod_base = OTHER; note = 2'-O-(2-methoxyethyl) ribonucleotide
  modified_base 7: mod_base = OTHER; note = 5-methyl cytidine
  modified_base 20: mod_base = OTHER; note = 5-methyl cytidine
tggtgtctgggtgagagagc

SEQ ID NO: 442 - RNA, 20 nt, synthetic construct
  source 1..20: mol_type = other RNA
  modified_base 1..20: mod_base = OTHER; note = Phosphorothioate linkage
  modified_base 1..20: mod_base = OTHER; note = 2'-O-(2-methoxyethyl) ribonucleotide
  modified_base 6..7: mod_base = OTHER; note = 5-methyl cytidine
  modified_base 10: mod_base = OTHER; note = 5-methyl cytidine
  modified_base 12..13: mod_base = OTHER; note = 5-methyl cytidine
  modified_base 20: mod_base = OTHER; note = 5-methyl cytidine
gagtgccttcacctggtgtc

SEQ ID NO: 443 - RNA, 20 nt, synthetic construct
  source 1..20: mol_type = other RNA
  modified_base 1..20: mod_base = OTHER; note = Phosphorothioate linkage
  modified_base 1..20: mod_base = OTHER; note = 2'-O-(2-methoxyethyl) ribonucleotide
  modified_base 4: mod_base = OTHER; note = 5-methyl cytidine
  modified_base 6..8: mod_base = OTHER; note = 5-methyl cytidine
  modified_base 12: mod_base = OTHER; note = 5-methyl cytidine
gttctccctagctgtgtagt

SEQ ID NO: 444 - RNA, 20 nt, synthetic construct
  source 1..20: mol_type = other RNA
  modified_base 1..20: mod_base = OTHER; note = Phosphorothioate linkage
  modified_base 1..20: mod_base = OTHER; note = 2'-O-(2-methoxyethyl) ribonucleotide
  modified_base 1: mod_base = OTHER; note = 5-methyl cytidine
  modified_base 15: mod_base = OTHER; note = 5-methyl cytidine
  modified_base 20: mod_base = OTHER; note = 5-methyl cytidine
ctagtggaagatgtcggagc

SEQ ID NO: 445 - RNA, 20 nt, synthetic construct
  source 1..20: mol_type = other RNA
  modified_base 1..20: mod_base = OTHER; note = Phosphorothioate linkage
  modified_base 1..20: mod_base = OTHER; note = 2'-O-(2-methoxyethyl) ribonucleotide
  modified_base 7: mod_base = OTHER; note = 5-methyl cytidine
  modified_base 12..15: mod_base = OTHER; note = 5-methyl cytidine
  modified_base 17: mod_base = OTHER; note = 5-methyl cytidine
  modified_base 20: mod_base = OTHER; note = 5-methyl cytidine
gaaattcatttcccctcgac

SEQ ID NO: 446 - RNA, 20 nt, synthetic construct
  source 1..20: mol_type = other RNA
  modified_base 1..20: mod_base = OTHER; note = Phosphorothioate linkage
  modified_base 1..20: mod_base = OTHER; note = 2'-O-(2-methoxyethyl) ribonucleotide
  modified_base 3: mod_base = OTHER; note = 5-methyl cytidine
  modified_base 12: mod_base = OTHER; note = 5-methyl cytidine
  modified_base 14: mod_base = OTHER; note = 5-methyl cytidine
  modified_base 16..17: mod_base = OTHER; note = 5-methyl cytidine
atctggattggctcaccttt

SEQ ID NO: 447 - RNA, 20 nt, synthetic construct
  source 1..20: mol_type = other RNA
  modified_base 1..20: mod_base = OTHER; note = Phosphorothioate linkage
  modified_base 1..20: mod_base = OTHER; note = 2'-O-(2-methoxyethyl) ribonucleotide
  modified_base 1: mod_base = OTHER; note = 5-methyl cytidine
  modified_base 3: mod_base = OTHER; note = 5-methyl cytidine
  modified_base 8..12: mod_base = OTHER; note = 5-methyl cytidine
  modified_base 14: mod_base = OTHER; note = 5-methyl cytidine
  modified_base 17..18: mod_base = OTHER; note = 5-methyl cytidine
  modified_base 20: mod_base = OTHER; note = 5-methyl cytidine
cacttttcccccgctgcctc

SEQ ID NO: 448 - RNA, 20 nt, synthetic construct
  source 1..20: mol_type = other RNA
  modified_base 1..20: mod_base = OTHER; note = Phosphorothioate linkage
  modified_base 1..20: mod_base = OTHER; note = 2'-O-(2-methoxyethyl) ribonucleotide
  modified_base 3: mod_base = OTHER; note = 5-methyl cytidine
  modified_base 10..11: mod_base = OTHER; note = 5-methyl cytidine
  modified_base 13..14: mod_base = OTHER; note = 5-methyl cytidine
  modified_base 16: mod_base = OTHER; note = 5-methyl cytidine
  modified_base 18..20: mod_base = OTHER; note = 5-methyl cytidine
agctaatttccgcctctccc

SEQ ID NO: 449 - RNA, 20 nt, synthetic construct
  source 1..20: mol_type = other RNA
  modified_base 1..20: mod_base = OTHER; note = Phosphorothioate linkage
  modified_base 1..20: mod_base = OTHER; note = 2'-O-(2-methoxyethyl) ribonucleotide
  modified_base 9: mod_base = OTHER; note = 5-methyl cytidine
  modified_base 12: mod_base = OTHER; note = 5-methyl cytidine
  modified_base 20: mod_base = OTHER; note = 5-methyl cytidine
ggttgtgtcagctttatttc

SEQ ID NO: 450 - RNA, 20 nt, synthetic construct
  source 1..20: mol_type = other RNA
  modified_base 1..20: mod_base = OTHER; note = Phosphorothioate linkage
  modified_base 1..20: mod_base = OTHER; note = 2'-O-(2-methoxyethyl) ribonucleotide
  modified_base 2: mod_base = OTHER; note = 5-methyl cytidine
  modified_base 10: mod_base = OTHER; note = 5-methyl cytidine
  modified_base 16..18: mod_base = OTHER; note = 5-methyl cytidine
gcgtgatggctgagtccctg

SEQ ID NO: 451 - RNA, 20 nt, synthetic construct
  source 1..20: mol_type = other RNA
  modified_base 1..20: mod_base = OTHER; note = Phosphorothioate linkage
  modified_base 1..20: mod_base = OTHER; note = 2'-O-(2-methoxyethyl) ribonucleotide
  modified_base 1..2: mod_base = OTHER; note = 5-methyl cytidine
  modified_base 3: mod_base = OTHER; note = 5-methyl cytidine
  modified_base 7..11: mod_base = OTHER; note = 5-methyl cytidine
  modified_base 16: mod_base = OTHER; note = 5-methyl cytidine
  modified_base 18: mod_base = OTHER; note = 5-methyl cytidine
ccttggcccccagagctcaa

SEQ ID NO: 452 - RNA, 20 nt, synthetic construct
  source 1..20: mol_type = other RNA
  modified_base 1..20: mod_base = OTHER; note = Phosphorothioate linkage
  modified_base 1..20: mod_base = OTHER; note = 2'-O-(2-methoxyethyl) ribonucleotide
  modified_base 1: mod_base = OTHER; note = 5-methyl cytidine
  modified_base 9: mod_base = OTHER; note = 5-methyl cytidine
  modified_base 11: mod_base = OTHER; note = 5-methyl cytidine
  modified_base 14: mod_base = OTHER; note = 5-methyl cytidine
  modified_base 17: mod_base = OTHER; note = 5-methyl cytidine
  modified_base 20: mod_base = OTHER; note = 5-methyl cytidine
caagtgttctctgcggcggc

SEQ ID NO: 453 - RNA, 20 nt, synthetic construct
  source 1..20: mol_type = other RNA
  modified_base 1..20: mod_base = OTHER; note = Phosphorothioate linkage
  modified_base 1..20: mod_base = OTHER; note = 2'-O-(2-methoxyethyl) ribonucleotide
  modified_base 3: mod_base = OTHER; note = 5-methyl cytidine
  modified_base 5: mod_base = OTHER; note = 5-methyl cytidine
  modified_base 9: mod_base = OTHER; note = 5-methyl cytidine
  modified_base 11: mod_base = OTHER; note = 5-methyl cytidine
  modified_base 15: mod_base = OTHER; note = 5-methyl cytidine
  modified_base 19: mod_base = OTHER; note = 5-methyl cytidine
ggctctttctctttcggacg

SEQ ID NO: 454 - RNA, 20 nt, synthetic construct
  source 1..20: mol_type = other RNA
  modified_base 1..20: mod_base = OTHER; note = Phosphorothioate linkage
  modified_base 1..20: mod_base = OTHER; note = 2'-O-(2-methoxyethyl) ribonucleotide
  modified_base 1: mod_base = OTHER; note = 5-methyl cytidine
  modified_base 3: mod_base = OTHER; note = 5-methyl cytidine
  modified_base 8..9: mod_base = OTHER; note = 5-methyl cytidine
  modified_base 13: mod_base = OTHER; note = 5-methyl cytidine
  modified_base 16..18: mod_base = OTHER; note = 5-methyl cytidine
  modified_base 20: mod_base = OTHER; note = 5-methyl cytidine
ctcttgtccgtacttcccac

SEQ ID NO: 455 - RNA, 20 nt, synthetic construct
  source 1..20: mol_type = other RNA
  modified_base 1..20: mod_base = OTHER; note = Phosphorothioate linkage
  modified_base 1..20: mod_base = OTHER; note = 2'-O-(2-methoxyethyl) ribonucleotide
  modified_base 5: mod_base = OTHER; note = 5-methyl cytidine
  modified_base 11..12: mod_base = OTHER; note = 5-methyl cytidine
  modified_base 14..17: mod_base = OTHER; note = 5-methyl cytidine
  modified_base 19: mod_base = OTHER; note = 5-methyl cytidine
aggacaggaaccaccccact

SEQ ID NO: 456 - RNA, 20 nt, synthetic construct
  source 1..20: mol_type = other RNA
  modified_base 1..20: mod_base = OTHER; note = Phosphorothioate linkage
  modified_base 1..20: mod_base = OTHER; note = 2'-O-(2-methoxyethyl) ribonucleotide
  modified_base 4: mod_base = OTHER; note = 5-methyl cytidine
  modified_base 11: mod_base = OTHER; note = 5-methyl cytidine
  modified_base 14: mod_base = OTHER; note = 5-methyl cytidine
  modified_base 18..19: mod_base = OTHER; note = 5-methyl cytidine
tgtcggaaagctgcaggcct

SEQ ID NO: 457 - RNA, 20 nt, synthetic construct
  source 1..20: mol_type = other RNA
  modified_base 1..20: mod_base = OTHER; note = Phosphorothioate linkage
  modified_base 1..20: mod_base = OTHER; note = 2'-O-(2-methoxyethyl) ribonucleotide
  modified_base 2..8: mod_base = OTHER; note = 5-methyl cytidine
  modified_base 18: mod_base = OTHER; note = 5-methyl cytidine
tcccccccaataagaggctt

SEQ ID NO: 458 - RNA, 20 nt, synthetic construct
  source 1..20: mol_type = other RNA
  modified_base 1..20: mod_base = OTHER; note = Phosphorothioate linkage
  modified_base 1..20: mod_base = OTHER; note = 2'-O-(2-methoxyethyl) ribonucleotide
  modified_base 1: mod_base = OTHER; note = 5-methyl cytidine
  modified_base 3: mod_base = OTHER; note = 5-methyl cytidine
  modified_base 8..12: mod_base = OTHER; note = 5-methyl cytidine
  modified_base 14: mod_base = OTHER; note = 5-methyl cytidine
  modified_base 17..18: mod_base = OTHER; note = 5-methyl cytidine
  modified_base 20: mod_base = OTHER; note = 5-methyl cytidine
gttgtagagacacctccccg

SEQ ID NO: 459 - RNA, 20 nt, synthetic construct
  source 1..20: mol_type = other RNA
  modified_base 1..20: mod_base = OTHER; note = Phosphorothioate linkage
  modified_base 1..20: mod_base = OTHER; note = 2'-O-(2-methoxyethyl) ribonucleotide
  modified_base 6: mod_base = OTHER; note = 5-methyl cytidine
  modified_base 8: mod_base = OTHER; note = 5-methyl cytidine
  modified_base 12: mod_base = OTHER; note = 5-methyl cytidine
tgatgcactaacgaggttgt

SEQ ID NO: 460 - RNA, 20 nt, synthetic construct
  source 1..20: mol_type = other RNA
  modified_base 1..20: mod_base = OTHER; note = Phosphorothioate linkage
  modified_base 1..20: mod_base = OTHER; note = 2'-O-(2-methoxyethyl) ribonucleotide
  modified_base 1..2: mod_base = OTHER; note = 5-methyl cytidine
  modified_base 4: mod_base = OTHER; note = 5-methyl cytidine
  modified_base 11: mod_base = OTHER; note = 5-methyl cytidine
  modified_base 13..16: mod_base = OTHER; note = 5-methyl cytidine
cctcttgaaactcccctagg

SEQ ID NO: 461 - RNA, 20 nt, synthetic construct
  source 1..20: mol_type = other RNA
  modified_base 1..20: mod_base = OTHER; note = Phosphorothioate linkage
  modified_base 1..20: mod_base = OTHER; note = 2'-O-(2-methoxyethyl) ribonucleotide
  modified_base 2..3: mod_base = OTHER; note = 5-methyl cytidine
  modified_base 8: mod_base = OTHER; note = 5-methyl cytidine
  modified_base 19..20: mod_base = OTHER; note = 5-methyl cytidine
gcctgtgcaattgagggtcc

SEQ ID NO: 462 - RNA, 20 nt, synthetic construct
  source 1..20: mol_type = other RNA
  modified_base 1..20: mod_base = OTHER; note = Phosphorothioate linkage
  modified_base 1..20: mod_base = OTHER; note = 2'-O-(2-methoxyethyl) ribonucleotide
  modified_base 2: mod_base = OTHER; note = 5-methyl cytidine
  modified_base 6: mod_base = OTHER; note = 5-methyl cytidine
  modified_base 10: mod_base = OTHER; note = 5-methyl cytidine
  modified_base 12..15: mod_base = OTHER; note = 5-methyl cytidine
  modified_base 18: mod_base = OTHER; note = 5-methyl cytidine
gcagacaatctccccggcta

SEQ ID NO: 463 - RNA, 20 nt, synthetic construct
  source 1..20: mol_type = other RNA
  modified_base 1..20: mod_base = OTHER; note = Phosphorothioate linkage
  modified_base 1..20: mod_base = OTHER; note = 2'-O-(2-methoxyethyl) ribonucleotide
  modified_base 2: mod_base = OTHER; note = 5-methyl cytidine
  modified_base 4: mod_base = OTHER; note = 5-methyl cytidine
  modified_base 16..18: mod_base = OTHER; note = 5-methyl cytidine
  modified_base 20: mod_base = OTHER; note = 5-methyl cytidine
acgcaggtaggaggaccctc

SEQ ID NO: 464 - RNA, 20 nt, synthetic construct
  source 1..20: mol_type = other RNA
  modified_base 1..20: mod_base = OTHER; note = Phosphorothioate linkage
  modified_base 1..20: mod_base = OTHER; note = 2'-O-(2-methoxyethyl) ribonucleotide
  modified_base 4: mod_base = OTHER; note = 5-methyl cytidine
  modified_base 8..9: mod_base = OTHER; note = 5-methyl cytidine
  modified_base 11..12: mod_base = OTHER; note = 5-methyl cytidine
  modified_base 18..19: mod_base = OTHER; note = 5-methyl cytidine
gagctgaccgccagatgcct

SEQ ID NO: 465 - RNA, 20 nt, synthetic construct
  source 1..20: mol_type = other RNA
  modified_base 1..20: mod_base = OTHER; note = Phosphorothioate linkage
  modified_base 1..20: mod_base = OTHER; note = 2'-O-(2-methoxyethyl) ribonucleotide
  modified_base 2: mod_base = OTHER; note = 5-methyl cytidine
gctaatggaaattgaggtgg

SEQ ID NO: 466 - RNA, 20 nt, synthetic construct
  source 1..20: mol_type = other RNA
  modified_base 1..20: mod_base = OTHER; note = Phosphorothioate linkage
  modified_base 1..20: mod_base = OTHER; note = 2'-O-(2-methoxyethyl) ribonucleotide
  modified_base 1: mod_base = OTHER; note = 5-methyl cytidine
  modified_base 3: mod_base = OTHER; note = 5-methyl cytidine
  modified_base 8..12: mod_base = OTHER; note = 5-methyl cytidine
  modified_base 14: mod_base = OTHER; note = 5-methyl cytidine
  modified_base 17..18: mod_base = OTHER; note = 5-methyl cytidine
  modified_base 20: mod_base = OTHER; note = 5-methyl cytidine
ccctggatctccgagcaatg

SEQ ID NO: 467 - RNA, 20 nt, synthetic construct
  source 1..20: mol_type = other RNA
  modified_base 1..20: mod_base = OTHER; note = Phosphorothioate linkage
  modified_base 1..20: mod_base = OTHER; note = 2'-O-(2-methoxyethyl) ribonucleotide
  modified_base 1..2: mod_base = OTHER; note = 5-methyl cytidine
  modified_base 4..5: mod_base = OTHER; note = 5-methyl cytidine
  modified_base 7: mod_base = OTHER; note = 5-methyl cytidine
  modified_base 10: mod_base = OTHER; note = 5-methyl cytidine
  modified_base 16: mod_base = OTHER; note = 5-methyl cytidine
ccgcctctacgtagacaagt

SEQ ID NO: 468 - RNA, 20 nt, synthetic construct
  source 1..20: mol_type = other RNA
  modified_base 1..20: mod_base = OTHER; note = Phosphorothioate linkage
  modified_base 1..20: mod_base = OTHER; note = 2'-O-(2-methoxyethyl) ribonucleotide
  modified_base 1: mod_base = OTHER; note = 5-methyl cytidine
  modified_base 11: mod_base = OTHER; note = 5-methyl cytidine
ggaatgtgaactgagtagaa

SEQ ID NO: 469 - RNA, 20 nt, synthetic construct
  source 1..20: mol_type = other RNA
  modified_base 1..20: mod_base = OTHER; note = Phosphorothioate linkage
  modified_base 1..20: mod_base = OTHER; note = 2'-O-(2-methoxyethyl) ribonucleotide
  modified_base 1: mod_base = OTHER; note = 5-methyl cytidine
  modified_base 6: mod_base = OTHER; note = 5-methyl cytidine
  modified_base 8: mod_base = OTHER; note = 5-methyl cytidine
  modified_base 14..16: mod_base = OTHER; note = 5-methyl cytidine
ctaatcacatgatccctaga

SEQ ID NO: 470 - RNA, 20 nt, synthetic construct
  source 1..20: mol_type = other RNA
  modified_base 1..20: mod_base = OTHER; note = Phosphorothioate linkage
  modified_base 1..20: mod_base = OTHER; note = 2'-O-(2-methoxyethyl) ribonucleotide
  modified_base 2: mod_base = OTHER; note = 5-methyl cytidine
  modified_base 11: mod_base = OTHER; note = 5-methyl cytidine
  modified_base 20: mod_base = OTHER; note = 5-methyl cytidine
gctatgttgtcatatgattc

SEQ ID NO: 471 - RNA, 20 nt, synthetic construct
  source 1..20: mol_type = other RNA
  modified_base 1..20: mod_base = OTHER; note = Phosphorothioate linkage
  modified_base 1..20: mod_base = OTHER; note = 2'-O-(2-methoxyethyl) ribonucleotide
  modified_base 2..3: mod_base = OTHER; note = 5-methyl cytidine
  modified_base 5..6: mod_base = OTHER; note = 5-methyl cytidine
  modified_base 11..13: mod_base = OTHER; note = 5-methyl cytidine
  modified_base 17..18: mod_base = OTHER; note = 5-methyl cytidine
gccgccagaacccaaaccag

SEQ ID NO: 472 - RNA, 20 nt, synthetic construct
  source 1..20: mol_type = other RNA
  modified_base 1..20: mod_base = OTHER; note = Phosphorothioate linkage
  modified_base 1..20: mod_base = OTHER; note = 2'-O-(2-methoxyethyl) ribonucleotide
  modified_base 3: mod_base = OTHER; note = 5-methyl cytidine
  modified_base 5: mod_base = OTHER; note = 5-methyl cytidine
  modified_base 8: mod_base = OTHER; note = 5-methyl cytidine
  modified_base 10: mod_base = OTHER; note = 5-methyl cytidine
  modified_base 13: mod_base = OTHER; note = 5-methyl cytidine
  modified_base 16: mod_base = OTHER; note = 5-methyl cytidine
  modified_base 18: mod_base = OTHER; note = 5-methyl cytidine
  modified_base 20: mod_base = OTHER; note = 5-methyl cytidine
gtctcatctctgcaacactc

SEQ ID NO: 473 - RNA, 20 nt, synthetic construct
  source 1..20: mol_type = other RNA
  modified_base 1..20: mod_base = OTHER; note = Phosphorothioate linkage
  modified_base 1..20: mod_base = OTHER; note = 2'-O-(2-methoxyethyl) ribonucleotide
  modified_base 2: mod_base = OTHER; note = 5-methyl cytidine
  modified_base 4: mod_base = OTHER; note = 5-methyl cytidine
  modified_base 6..7: mod_base = OTHER; note = 5-methyl cytidine
  modified_base 11: mod_base = OTHER; note = 5-methyl cytidine
  modified_base 20: mod_base = OTHER; note = 5-methyl cytidine
gctctcctaactgtgggtgc

SEQ ID NO: 474 - RNA, 20 nt, synthetic construct
  source 1..20: mol_type = other RNA
  modified_base 1..20: mod_base = OTHER; note = Phosphorothioate linkage
  modified_base 1..20: mod_base = OTHER; note = 2'-O-(2-methoxyethyl) ribonucleotide
  modified_base 6: mod_base = OTHER; note = 5-methyl cytidine
  modified_base 9..10: mod_base = OTHER; note = 5-methyl cytidine
  modified_base 16: mod_base = OTHER; note = 5-methyl cytidine
  modified_base 18: mod_base = OTHER; note = 5-methyl cytidine
gtaaacgaccttgaacgcgt

SEQ ID NO: 475 - RNA, 20 nt, synthetic construct
  source 1..20: mol_type = other RNA
  modified_base 1..20: mod_base = OTHER; note = Phosphorothioate linkage
  modified_base 1..20: mod_base = OTHER; note = 2'-O-(2-methoxyethyl) ribonucleotide
  modified_base 6: mod_base = OTHER; note = 5-methyl cytidine
  modified_base 13..15: mod_base = OTHER; note = 5-methyl cytidine
  modified_base 19..20: mod_base = OTHER; note = 5-methyl cytidine
atgtacaaaagtcccgatcc

SEQ ID NO: 476 - RNA, 20 nt, synthetic construct
  source 1..20: mol_type = other RNA
  modified_base 1..20: mod_base = OTHER; note = Phosphorothioate linkage
  modified_base 1..20: mod_base = OTHER; note = 2'-O-(2-methoxyethyl) ribonucleotide
  modified_base 1: mod_base = OTHER; note = 5-methyl cytidine
  modified_base 4..5: mod_base = OTHER; note = 5-methyl cytidine
  modified_base 9: mod_base = OTHER; note = 5-methyl cytidine
  modified_base 19: mod_base = OTHER; note = 5-methyl cytidine
ctgccaggcgtgaagagaca

SEQ ID NO: 477 - RNA, 20 nt, synthetic construct
  source 1..20: mol_type = other RNA
  modified_base 1..20: mod_base = OTHER; note = Phosphorothioate linkage
  modified_base 1..20: mod_base = OTHER; note = 2'-O-(2-methoxyethyl) ribonucleotide
  modified_base 3..4: mod_base = OTHER; note = 5-methyl cytidine
  modified_base 7: mod_base = OTHER; note = 5-methyl cytidine
  modified_base 14: mod_base = OTHER; note = 5-methyl cytidine
  modified_base 19..20: mod_base = OTHER; note = 5-methyl cytidine
ttccaactggtttcgagtcc

SEQ ID NO: 478 - RNA, 20 nt, synthetic construct
  source 1..20: mol_type = other RNA
  modified_base 1..20: mod_base = OTHER; note = Phosphorothioate linkage
  modified_base 1..20: mod_base = OTHER; note = 2'-O-(2-methoxyethyl) ribonucleotide
  modified_base 3: mod_base = OTHER; note = 5-methyl cytidine
  modified_base 11: mod_base = OTHER; note = 5-methyl cytidine
  modified_base 14: mod_base = OTHER; note = 5-methyl cytidine
  modified_base 16..18: mod_base = OTHER; note = 5-methyl cytidine
  modified_base 20: mod_base = OTHER; note = 5-methyl cytidine
gactatttatcttcaccctc

SEQ ID NO: 479 - RNA, 20 nt, synthetic construct
  source 1..20: mol_type = other RNA
  modified_base 1..20: mod_base = OTHER; note = Phosphorothioate linkage
  modified_base 1..20: mod_base = OTHER; note = 2'-O-(2-methoxyethyl) ribonucleotide
  modified_base 2..3: mod_base = OTHER; note = 5-methyl cytidine
  modified_base 5: mod_base = OTHER; note = 5-methyl cytidine
  modified_base 7: mod_base = OTHER; note = 5-methyl cytidine
  modified_base 9..12: mod_base = OTHER; note = 5-methyl cytidine
  modified_base 16: mod_base = OTHER; note = 5-methyl cytidine
  modified_base 20: mod_base = OTHER; note = 5-methyl cytidine
gccactctccccattcaaac

SEQ ID NO: 480 - RNA, 20 nt, synthetic construct
  source 1..20: mol_type = other RNA
  modified_base 1..20: mod_base = OTHER; note = Phosphorothioate linkage
  modified_base 1..20: mod_base = OTHER; note = 2'-O-(2-methoxyethyl) ribonucleotide
  modified_base 1: mod_base = OTHER; note = 5-methyl cytidine
  modified_base 3..5: mod_base = OTHER; note = 5-methyl cytidine
  modified_base 11..12: mod_base = OTHER; note = 5-methyl cytidine
cgcccttgaacctttattag

SEQ ID NO: 481 - RNA, 20 nt, synthetic construct
  source 1..20: mol_type = other RNA
  modified_base 1..20: mod_base = OTHER; note = Phosphorothioate linkage
  modified_base 1..20: mod_base = OTHER; note = 2'-O-(2-methoxyethyl) ribonucleotide
  modified_base 1: mod_base = OTHER; note = 5-methyl cytidine
  modified_base 3: mod_base = OTHER; note = 5-methyl cytidine
  modified_base 6: mod_base = OTHER; note = 5-methyl cytidine
  modified_base 9: mod_base = OTHER; note = 5-methyl cytidine
  modified_base 14..16: mod_base = OTHER; note = 5-methyl cytidine
cacatctacagtgcccggta

SEQ ID NO: 482 - RNA, 20 nt, synthetic construct
  source 1..20: mol_type = other RNA
  modified_base 1..20: mod_base = OTHER; note = Phosphorothioate linkage
  modified_base 1..20: mod_base = OTHER; note = 2'-O-(2-methoxyethyl) ribonucleotide
  modified_base 2..7: mod_base = OTHER; note = 5-methyl cytidine
  modified_base 16..17: mod_base = OTHER; note = 5-methyl cytidine
tccccccagtttgagccaat

SEQ ID NO: 483 - RNA, 20 nt, synthetic construct
  source 1..20: mol_type = other RNA
  modified_base 1..20: mod_base = OTHER; note = Phosphorothioate linkage
  modified_base 1..20: mod_base = OTHER; note = 2'-O-(2-methoxyethyl) ribonucleotide
  modified_base 2: mod_base = OTHER; note = 5-methyl cytidine
  modified_base 5: mod_base = OTHER; note = 5-methyl cytidine
  modified_base 15: mod_base = OTHER; note = 5-methyl cytidine
  modified_base 20: mod_base = OTHER; note = 5-methyl cytidine
gcttcaatttaatgcagtgc

SEQ ID NO: 484 - RNA, 20 nt, synthetic construct
  source 1..20: mol_type = other RNA
  modified_base 1..20: mod_base = OTHER; note = Phosphorothioate linkage
  modified_base 1..20: mod_base = OTHER; note = 2'-O-(2-methoxyethyl) ribonucleotide
  modified_base 3..5: mod_base = OTHER; note = 5-methyl cytidine
  modified_base 7..8: mod_base = OTHER; note = 5-methyl cytidine
  modified_base 13: mod_base = OTHER; note = 5-methyl cytidine
  modified_base 16..17: mod_base = OTHER; note = 5-methyl cytidine
  modified_base 19: mod_base = OTHER; note = 5-methyl cytidine
gtcccaccttatcagcctct

SEQ ID NO: 485 - RNA, 20 nt, synthetic construct
  source 1..20: mol_type = other RNA
  modified_base 1..20: mod_base = OTHER; note = Phosphorothioate linkage
  modified_base 1..20: mod_base = OTHER; note = 2'-O-(2-methoxyethyl) ribonucleotide
  modified_base 4: mod_base = OTHER; note = 5-methyl cytidine
  modified_base 11: mod_base = OTHER; note = 5-methyl cytidine
  modified_base 17..18: mod_base = OTHER; note = 5-methyl cytidine
  modified_base 20: mod_base = OTHER; note = 5-methyl cytidine
aatctagtttcaagttcctc

SEQ ID NO: 486 - RNA, 20 nt, synthetic construct
  source 1..20: mol_type = other RNA
  modified_base 1..20: mod_base = OTHER; note = Phosphorothioate linkage
  modified_base 1..20: mod_base = OTHER; note = 2'-O-(2-methoxyethyl) ribonucleotide
  modified_base 3..5: mod_base = OTHER; note = 5-methyl cytidine
  modified_base 18: mod_base = OTHER; note = 5-methyl cytidine
  modified_base 20: mod_base = OTHER; note = 5-methyl cytidine
tacccaaggaaaggattcac

SEQ ID NO: 487 - RNA, 20 nt, synthetic construct
  source 1..20: mol_type = other RNA
  modified_base 1..20: mod_base = OTHER; note = Phosphorothioate linkage
  modified_base 1..20: mod_base = OTHER; note = 2'-O-(2-methoxyethyl) ribonucleotide
  modified_base 3: mod_base = OTHER; note = 5-methyl cytidine
  modified_base 13: mod_base = OTHER; note = 5-methyl cytidine
gtctgtaaagaacaagatat

SEQ ID NO: 488 - RNA, 20 nt, synthetic construct
  source 1..20: mol_type = other RNA
  modified_base 1..20: mod_base = OTHER; note = Phosphorothioate linkage
  modified_base 1..20: mod_base = OTHER; note = 2'-O-(2-methoxyethyl) ribonucleotide
  modified_base 4: mod_base = OTHER; note = 5-methyl cytidine
  modified_base 7..9: mod_base = OTHER; note = 5-methyl cytidine
  modified_base 13: mod_base = OTHER; note = 5-methyl cytidine
  modified_base 20: mod_base = OTHER; note = 5-methyl cytidine
tttcaacccttgctagaggc

SEQ ID NO: 489 - RNA, 20 nt, synthetic construct
  source 1..20: mol_type = other RNA
  modified_base 1..20: mod_base = OTHER; note = Phosphorothioate linkage
  modified_base 1..20: mod_base = OTHER; note = 2'-O-(2-methoxyethyl) ribonucleotide
  modified_base 6..8: mod_base = OTHER; note = 5-methyl cytidine
  modified_base 13: mod_base = OTHER; note = 5-methyl cytidine
  modified_base 19: mod_base = OTHER; note = 5-methyl cytidine
taatgcccttatcttgaacg

SEQ ID NO: 490 - RNA, 20 nt, synthetic construct
  source 1..20: mol_type = other RNA
  modified_base 1..20: mod_base = OTHER; note = Phosphorothioate linkage
  modified_base 1..20: mod_base = OTHER; note = 2'-O-(2-methoxyethyl) ribonucleotide
  modified_base 1..2: mod_base = OTHER; note = 5-methyl cytidine
  modified_base 4..5: mod_base = OTHER; note = 5-methyl cytidine
  modified_base 8..9: mod_base = OTHER; note = 5-methyl cytidine
  modified_base 12: mod_base = OTHER; note = 5-methyl cytidine
  modified_base 14..15: mod_base = OTHER; note = 5-methyl cytidine
  modified_base 17: mod_base = OTHER; note = 5-methyl cytidine
ccaccagcctactccacagg

SEQ ID NO: 491 - RNA, 20 nt, synthetic construct
  source 1..20: mol_type = other RNA
  modified_base 1..20: mod_base = OTHER; note = Phosphorothioate linkage
  modified_base 1..20: mod_base = OTHER; note = 2'-O-(2-methoxyethyl) ribonucleotide
  modified_base 2..3: mod_base = OTHER; note = 5-methyl cytidine
  modified_base 5..8: mod_base = OTHER; note = 5-methyl cytidine
  modified_base 11..12: mod_base = OTHER; note = 5-methyl cytidine
  modified_base 15: mod_base = OTHER; note = 5-methyl cytidine
  modified_base 17: mod_base = OTHER; note = 5-methyl cytidine
  modified_base 20: mod_base = OTHER; note = 5-methyl cytidine
gaaaccccttccatctcgac

SEQ ID NO: 492 - RNA, 20 nt, synthetic construct
  source 1..20: mol_type = other RNA
  modified_base 1..20: mod_base = OTHER; note = Phosphorothioate linkage
  modified_base 1..20: mod_base = OTHER; note = 2'-O-(2-methoxyethyl) ribonucleotide
  modified_base 1: mod_base = OTHER; note = 5-methyl cytidine
  modified_base 6: mod_base = OTHER; note = 5-methyl cytidine
  modified_base 11..12: mod_base = OTHER; note = 5-methyl cytidine
  modified_base 14: mod_base = OTHER; note = 5-methyl cytidine
cataacaattcctcgaaggt

SEQ ID NO: 493 - RNA, 20 nt, synthetic construct
  source 1..20: mol_type = other RNA
  modified_base 1..20: mod_base = OTHER; note = Phosphorothioate linkage
  modified_base 1..20: mod_base = OTHER; note = 2'-O-(2-methoxyethyl) ribonucleotide
  modified_base 1: mod_base = OTHER; note = 5-methyl cytidine
  modified_base 7: mod_base = OTHER; note = 5-methyl cytidine
  modified_base 9: mod_base = OTHER; note = 5-methyl cytidine
  modified_base 14: mod_base = OTHER; note = 5-methyl cytidine
  modified_base 16..18: mod_base = OTHER; note = 5-methyl cytidine
  modified_base 20: mod_base = OTHER; note = 5-methyl cytidine
catggtctctattcacccac

SEQ ID NO: 494 - RNA, 20 nt, synthetic construct
  source 1..20: mol_type = other RNA
  modified_base 1..20: mod_base = OTHER; note = Phosphorothioate linkage
  modified_base 1..20: mod_base = OTHER; note = 2'-O-(2-methoxyethyl) ribonucleotide
  modified_base 1..2: mod_base = OTHER; note = 5-methyl cytidine
  modified_base 7: mod_base = OTHER; note = 5-methyl cytidine
  modified_base 15: mod_base = OTHER; note = 5-methyl cytidine
  modified_base 19..20: mod_base = OTHER; note = 5-methyl cytidine
cctgaactgtatggctgacc

SEQ ID NO: 495 - RNA, 20 nt, synthetic construct
  source 1..20: mol_type = other RNA
  modified_base 1..20: mod_base = OTHER; note = Phosphorothioate linkage
  modified_base 1..20: mod_base = OTHER; note = 2'-O-(2-methoxyethyl) ribonucleotide
  modified_base 1: mod_base = OTHER; note = 5-methyl cytidine
  modified_base 3: mod_base = OTHER; note = 5-methyl cytidine
  modified_base 13: mod_base = OTHER; note = 5-methyl cytidine
  modified_base 15..17: mod_base = OTHER; note = 5-methyl cytidine
  modified_base 19: mod_base = OTHER; note = 5-methyl cytidine
ctctatgtaagactcccact

SEQ ID NO: 496 - RNA, 20 nt, synthetic construct
  source 1..20: mol_type = other RNA
  modified_base 1..20: mod_base = OTHER; note = Phosphorothioate linkage
  modified_base 1..20: mod_base = OTHER; note = 2'-O-(2-methoxyethyl) ribonucleotide
  modified_base 2: mod_base = OTHER; note = 5-methyl cytidine
  modified_base 5..7: mod_base = OTHER; note = 5-methyl cytidine
  modified_base 10: mod_base = OTHER; note = 5-methyl cytidine
  modified_base 14: mod_base = OTHER; note = 5-methyl cytidine
  modified_base 16: mod_base = OTHER; note = 5-methyl cytidine
  modified_base 18..19: mod_base = OTHER; note = 5-methyl cytidine
acaaccctgcatgcactcct

SEQ ID NO: 497 - RNA, 20 nt, synthetic construct
  source 1..20: mol_type = other RNA
  modified_base 1..20: mod_base = OTHER; note = Phosphorothioate linkage
  modified_base 1..20: mod_base = OTHER; note = 2'-O-(2-methoxyethyl) ribonucleotide
  modified_base 8..10: mod_base = OTHER; note = 5-methyl cytidine
  modified_base 12: mod_base = OTHER; note = 5-methyl cytidine
  modified_base 14: mod_base = OTHER; note = 5-methyl cytidine
taagaagccctcacggaatt

SEQ ID NO: 498 - RNA, 20 nt, synthetic construct
  source 1..20: mol_type = other RNA
  modified_base 1..20: mod_base = OTHER; note = Phosphorothioate linkage
  modified_base 1..20: mod_base = OTHER; note = 2'-O-(2-methoxyethyl) ribonucleotide
  modified_base 7: mod_base = OTHER; note = 5-methyl cytidine
  modified_base 9..10: mod_base = OTHER; note = 5-methyl cytidine
  modified_base 14: mod_base = OTHER; note = 5-methyl cytidine
  modified_base 18: mod_base = OTHER; note = 5-methyl cytidine
  modified_base 20: mod_base = OTHER; note = 5-methyl cytidine
atgatgcaccagtcttacac

SEQ ID NO: 499 - RNA, 20 nt, synthetic construct
  source 1..20: mol_type = other RNA
  modified_base 1..20: mod_base = OTHER; note = Phosphorothioate linkage
  modified_base 1..20: mod_base = OTHER; note = 2'-O-(2-methoxyethyl) ribonucleotide
  modified_base 5: mod_base = OTHER; note = 5-methyl cytidine
  modified_base 7..8: mod_base = OTHER; note = 5-methyl cytidine
  modified_base 13: mod_base = OTHER; note = 5-methyl cytidine
  modified_base 17: mod_base = OTHER; note = 5-methyl cytidine
  modified_base 19..20: mod_base = OTHER; note = 5-methyl cytidine
ggaacacctatgctaacacc

SEQ ID NO: 500 - DNA, 20 bp, synthetic construct
  source 1..20: mol_type = other DNA
  modified_base 1..20: mod_base = OTHER; note = Phosphorothioate linkage
  modified_base 1..5: mod_base = OTHER; note = 2'-O-(2-methoxyethyl) ribonucleotide
  misc_feature 6..15: note = DNA
  modified_base 16..20: mod_base = OTHER; note = 2'-O-(2-methoxyethyl) ribonucleotide
  modified_base 4: mod_base = OTHER; note = 5-methyl cytidine
gttctccctagctgtgtagt

SEQ ID NO: 501 - DNA, 20 bp, synthetic construct
  source 1..20: mol_type = other DNA
  modified_base 1..20: mod_base = OTHER; note = Phosphorothioate linkage
  modified_base 1..5: mod_base = OTHER; note = 2'-O-(2-methoxyethyl) ribonucleotide
  misc_feature 6..15: note = DNA
  modified_base 16..20: mod_base = OTHER; note = 2'-O-(2-methoxyethyl) ribonucleotide
  modified_base 1..2: mod_base = OTHER; note = 5-methyl cytidine
  modified_base 19..20: mod_base = OTHER; note = 5-methyl cytidine
cctgaactgtatggctgacc

SEQ ID NO: 502 - DNA, 20 bp, synthetic construct
  source 1..20: mol_type = other DNA
  modified_base 1..20: mod_base = OTHER; note = Phosphorothioate linkage
  modified_base 1..5: mod_base = OTHER; note = 2'-O-(2-methoxyethyl) ribonucleotide
  misc_feature 6..15: note = DNA
  modified_base 16..20: mod_base = OTHER; note = 2'-O-(2-methoxyethyl) ribonucleotide
  modified_base 4: mod_base = OTHER; note = 5-methyl cytidine
  modified_base 12: mod_base = OTHER; note = 5-methyl cytidine
gttctccctagctgtgtagt

SEQ ID NO: 503 - DNA, 20 bp, synthetic construct
  source 1..20: mol_type = other DNA
  modified_base 1..20: mod_base = OTHER; note = Phosphorothioate linkage
  modified_base 1..5: mod_base = OTHER; note = 2'-O-(2-methoxyethyl) ribonucleotide
  misc_feature 6..15: note = DNA
  modified_base 16..20: mod_base = OTHER; note = 2'-O-(2-methoxyethyl) ribonucleotide
  modified_base 1..2: mod_base = OTHER; note = 5-methyl cytidine
  modified_base 19..20: mod_base = OTHER; note = 5-methyl cytidine
cctgaactgtatggctgacc

SEQ ID NO: 504 - RNA, 20 nt, synthetic construct
  source 1..20: mol_type = other RNA
  modified_base 1..20: mod_base = OTHER; note = Phosphorothioate linkage
  modified_base 1..5: mod_base = OTHER; note = 2'-O-(2-methoxyethyl) ribonucleotide
  modified_base 6: mod_base = OTHER; note = locked nucleic acid
  modified_base 7..8: mod_base = OTHER; note = 2'-O-(2-methoxyethyl) ribonucleotide
  modified_base 9: mod_base = OTHER; note = locked nucleic acid
  modified_base 10..11: mod_base = OTHER; note = 2'-O-(2-methoxyethyl) ribonucleotide
  modified_base 12: mod_base = OTHER; note = locked nucleic acid
  modified_base 13..14: mod_base = OTHER; note = 2'-O-(2-methoxyethyl) ribonucleotide
  modified_base 15: mod_base = OTHER; note = locked nucleic acid
  modified_base 16..20: mod_base = OTHER; note = 2'-O-(2-methoxyethyl) ribonucleotide
  modified_base 4: mod_base = OTHER; note = 5-methyl cytidine
  modified_base 6..8: mod_base = OTHER; note = 5-methyl cytidine
  modified_base 12: mod_base = OTHER; note = 5-methyl cytidine
gttctccctagctgtgtagt

SEQ ID NO: 505 - RNA, 20 nt, synthetic construct
  source 1..20: mol_type = other RNA
  modified_base 1..20: mod_base = OTHER; note = Phosphorothioate linkage
  modified_base 1..5: mod_base = OTHER; note = 2'-O-(2-methoxyethyl) ribonucleotide
  modified_base 6: mod_base = OTHER; note = locked nucleic acid
  modified_base 7..8: mod_base = OTHER; note = 2'-O-(2-methoxyethyl) ribonucleotide
  modified_base 9: mod_base = OTHER; note = locked nucleic acid
  modified_base 10..11: mod_base = OTHER; note = 2'-O-(2-methoxyethyl) ribonucleotide
  modified_base 12: mod_base = OTHER; note = locked nucleic acid
  modified_base 13..14: mod_base = OTHER; note = 2'-O-(2-methoxyethyl) ribonucleotide
  modified_base 15: mod_base = OTHER; note = locked nucleic acid
  modified_base 16..20: mod_base = OTHER; note = 2'-O-(2-methoxyethyl) ribonucleotide
  modified_base 1..2: mod_base = OTHER; note = 5-methyl cytidine
  modified_base 7: mod_base = OTHER; note = 5-methyl cytidine
  modified_base 15: mod_base = OTHER; note = 5-methyl cytidine
  modified_base 19..20: mod_base = OTHER; note = 5-methyl cytidine
cctgaactgtatggctgacc

SEQ ID NO: 506 - RNA, 22 nt, synthetic construct
  source 1..22: mol_type = other RNA
  modified_base 1..22: mod_base = OTHER; note = Phosphorothioate linkage
  modified_base 1..22: mod_base = OTHER; note = 2'-O-(2-methoxyethyl) ribonucleotide
  modified_base 5: mod_base = OTHER; note = 5-methyl cytidine
  modified_base 7..9: mod_base = OTHER; note = 5-methyl cytidine
  modified_base 13: mod_base = OTHER; note = 5-methyl cytidine
  modified_base 19..20: mod_base = OTHER; note = 5-methyl cytidine
agttctccctagctgtgtagtg

SEQ ID NO: 507 - RNA, 24 nt, synthetic construct
  source 1..24: mol_type = other RNA
  modified_base 1..24: mod_base = OTHER; note = Phosphorothioate linkage
  modified_base 1..24: mod_base = OTHER; note = 2'-O-(2-methoxyethyl) ribonucleotide
  modified_base 1: mod_base = OTHER; note = 5-methyl cytidine
  modified_base 6: mod_base = OTHER; note = 5-methyl cytidine
  modified_base 8..10: mod_base = OTHER; note = 5-methyl cytidine
  modified_base 14: mod_base = OTHER; note = 5-methyl cytidine
cagttctccctagctgtgtagtgt

SEQ ID NO: 508 - RNA, 22 nt, synthetic construct
  source 1..22: mol_type = other RNA
  modified_base 1..22: mod_base = OTHER; note = Phosphorothioate linkage
  modified_base 1..22: mod_base = OTHER; note = 2'-O-(2-methoxyethyl) ribonucleotide
  modified_base 2..3: mod_base = OTHER; note = 5-methyl cytidine
  modified_base 8: mod_base = OTHER; note = 5-methyl cytidine
  modified_base 16: mod_base = OTHER; note = 5-methyl cytidine
  modified_base 20..22: mod_base = OTHER; note = 5-methyl cytidine
tcctgaactgtatggctgaccc

SEQ ID NO: 509 - RNA, 24 nt, synthetic construct
  source 1..24: mol_type = other RNA
  modified_base 1..24: mod_base = OTHER; note = Phosphorothioate linkage
  modified_base 1..24: mod_base = OTHER; note = 2'-O-(2-methoxyethyl) ribonucleotide
  modified_base 3..4: mod_base = OTHER; note = 5-methyl cytidine
  modified_base 9: mod_base = OTHER; note = 5-methyl cytidine
  modified_base 17: mod_base = OTHER; note = 5-methyl cytidine
  modified_base 21..24: mod_base = OTHER; note = 5-methyl cytidine
gtcctgaactgtatggctgacccc

SEQ ID NO: 510 - RNA, 20 nt, synthetic construct
  source 1..20: mol_type = other RNA
  modified_base 1..20: mod_base = OTHER; note = Phosphorothioate linkage
  modified_base 1..20: mod_base = OTHER; note = 2'-O-(2-methoxyethyl) ribonucleotide
  modified_base 3: mod_base = OTHER; note = 5-methyl cytidine
  modified_base 5..7: mod_base = OTHER; note = 5-methyl cytidine
  modified_base 11: mod_base = OTHER; note = 5-methyl cytidine
ttctccctagctgtgtagtg

SEQ ID NO: 511 - RNA, 20 nt, synthetic construct
  source 1..20: mol_type = other RNA
  modified_base 1..20: mod_base = OTHER; note = Phosphorothioate linkage
  modified_base 1..20: mod_base = OTHER; note = 2'-O-(2-methoxyethyl) ribonucleotide
  modified_base 1: mod_base = OTHER; note = 5-methyl cytidine
  modified_base 6: mod_base = OTHER; note = 5-methyl cytidine
  modified_base 8..10: mod_base = OTHER; note = 5-methyl cytidine
  modified_base 14: mod_base = OTHER; note = 5-methyl cytidine
cagttctccctagctgtgta

SEQ ID NO: 512 - RNA, 20 nt, synthetic construct
  source 1..20: mol_type = other RNA
  modified_base 1..20: mod_base = OTHER; note = Phosphorothioate linkage
  modified_base 1..20: mod_base = OTHER; note = 2'-O-(2-methoxyethyl) ribonucleotide
  modified_base 1: mod_base = OTHER; note = 5-methyl cytidine
  modified_base 3..4: mod_base = OTHER; note = 5-methyl cytidine
  modified_base 9: mod_base = OTHER; note = 5-methyl cytidine
  modified_base 11..13: mod_base = OTHER; note = 5-methyl cytidine
  modified_base 17: mod_base = OTHER; note = 5-methyl cytidine
ctccagttctccctagctgt

SEQ ID NO: 513 - RNA, 20 nt, synthetic construct
  source 1..20: mol_type = other RNA
  modified_base 1..20: mod_base = OTHER; note = Phosphorothioate linkage
  modified_base 1..20: mod_base = OTHER; note = 2'-O-(2-methoxyethyl) ribonucleotide
  modified_base 4: mod_base = OTHER; note = 5-methyl cytidine
  modified_base 6..7: mod_base = OTHER; note = 5-methyl cytidine
  modified_base 12: mod_base = OTHER; note = 5-methyl cytidine
  modified_base 14..16: mod_base = OTHER; note = 5-methyl cytidine
  modified_base 20: mod_base = OTHER; note = 5-methyl cytidine
aggctccagttctccctagc

SEQ ID NO: 514 - RNA, 20 nt, synthetic construct
  source 1..20: mol_type = other RNA
  modified_base 1..20: mod_base = OTHER; note = Phosphorothioate linkage
  modified_base 1..20: mod_base = OTHER; note = 2'-O-(2-methoxyethyl) ribonucleotide
  modified_base 7: mod_base = OTHER; note = 5-methyl cytidine
  modified_base 9..10: mod_base = OTHER; note = 5-methyl cytidine
  modified_base 15: mod_base = OTHER; note = 5-methyl cytidine
  modified_base 17..19: mod_base = OTHER; note = 5-methyl cytidine
gaaaggctccagttctccct

SEQ ID NO: 515 - RNA, 20 nt, synthetic construct
  source 1..20: mol_type = other RNA
  modified_base 1..20: mod_base = OTHER; note = Phosphorothioate linkage
  modified_base 1..20: mod_base = OTHER; note = 2'-O-(2-methoxyethyl) ribonucleotide
  modified_base 8: mod_base = OTHER; note = 5-methyl cytidine
  modified_base 12..16: mod_base = OTHER; note = 5-methyl cytidine
tgtatggctgacccccatgg

SEQ ID NO: 516 - RNA, 20 nt, synthetic construct
  source 1..20: mol_type = other RNA
  modified_base 1..20: mod_base = OTHER; note = Phosphorothioate linkage
  modified_base 1..20: mod_base = OTHER; note = 2'-O-(2-methoxyethyl) ribonucleotide
  modified_base 3: mod_base = OTHER; note = 5-methyl cytidine
  modified_base 11: mod_base = OTHER; note = 5-methyl cytidine
  modified_base 15..19: mod_base = OTHER; note = 5-methyl cytidine
aactgtatggctgaccccca

SEQ ID NO: 517 - RNA, 20 nt, synthetic construct
  source 1..20: mol_type = other RNA
  modified_base 1..20: mod_base = OTHER; note = Phosphorothioate linkage
  modified_base 1..20: mod_base = OTHER; note = 2'-O-(2-methoxyethyl) ribonucleotide
  modified_base 5: mod_base = OTHER; note = 5-methyl cytidine
  modified_base 13: mod_base = OTHER; note = 5-methyl cytidine
  modified_base 17..20: mod_base = OTHER; note = 5-methyl cytidine
tgaactgtatggctgacccc

SEQ ID NO: 518 - RNA, 20 nt, synthetic construct
  source 1..20: mol_type = other RNA
  modified_base 1..20: mod_base = OTHER; note = Phosphorothioate linkage
  modified_base 1..20: mod_base = OTHER; note = 2'-O-(2-methoxyethyl) ribonucleotide
  modified_base 1: mod_base = OTHER; note = 5-methyl cytidine
  modified_base 6: mod_base = OTHER; note = 5-methyl cytidine
  modified_base 14: mod_base = OTHER; note = 5-methyl cytidine
  modified_base 18..20: mod_base = OTHER; note = 5-methyl cytidine
ctgaactgtatggctgaccc

SEQ ID NO: 519 - RNA, 20 nt, synthetic construct
  source 1..20: mol_type = other RNA
  modified_base 1..20: mod_base = OTHER; note = Phosphorothioate linkage
  modified_base 1..20: mod_base = OTHER; note = 2'-O-(2-methoxyethyl) ribonucleotide
  modified_base 2..3: mod_base = OTHER; note = 5-methyl cytidine
  modified_base 8: mod_base = OTHER; note = 5-methyl cytidine
  modified_base 16: mod_base = OTHER; note = 5-methyl cytidine
  modified_base 20: mod_base = OTHER; note = 5-methyl cytidine
tcctgaactgtatggctgac

SEQ ID NO: 520 - RNA, 20 nt, synthetic construct
  source 1..20: mol_type = other RNA
  modified_base 1..20: mod_base = OTHER; note = Phosphorothioate linkage
  modified_base 1..20: mod_base = OTHER; note = 2'-O-(2-methoxyethyl) ribonucleotide
  modified_base 3..4: mod_base = OTHER; note = 5-methyl cytidine
  modified_base 9: mod_base = OTHER; note = 5-methyl cytidine
  modified_base 17: mod_base = OTHER; note = 5-methyl cytidine
gtcctgaactgtatggctga

SEQ ID NO: 521 - RNA, 20 nt, synthetic construct
  source 1..20: mol_type = other RNA
  modified_base 1..20: mod_base = OTHER; note = Phosphorothioate linkage
  modified_base 1..20: mod_base = OTHER; note = 2'-O-(2-methoxyethyl) ribonucleotide
  modified_base 1: mod_base = OTHER; note = 5-methyl cytidine
  modified_base 5..6: mod_base = OTHER; note = 5-methyl cytidine
  modified_base 11: mod_base = OTHER; note = 5-methyl cytidine
  modified_base 19: mod_base = OTHER; note = 5-methyl cytidine
ctgtcctgaactgtatggct

SEQ ID NO: 522 - RNA, 20 nt, synthetic construct
  source 1..20: mol_type = other RNA
  modified_base 1..20: mod_base = OTHER; note = Phosphorothioate linkage
  modified_base 1..20: mod_base = OTHER; note = 2'-O-(2-methoxyethyl) ribonucleotide
  modified_base 2: mod_base = OTHER; note = 5-methyl cytidine
  modified_base 4: mod_base = OTHER; note = 5-methyl cytidine
  modified_base 8..9: mod_base = OTHER; note = 5-methyl cytidine
  modified_base 14: mod_base = OTHER; note = 5-methyl cytidine
ccactgtcctgaactgtatg

SEQ ID NO: 523 - RNA, 20 nt, synthetic construct
  source 1..20: mol_type = other RNA
  modified_base 1..20: mod_base = OTHER; note = Phosphorothioate linkage
  modified_base 1..20: mod_base = OTHER; note = 2'-O-(2-methoxyethyl) ribonucleotide
  modified_base 2: mod_base = OTHER; note = 5-methyl cytidine
  modified_base 4..6: mod_base = OTHER; note = 5-methyl cytidine
  modified_base 8: mod_base = OTHER; note = 5-methyl cytidine
  modified_base 12..13: mod_base = OTHER; note = 5-methyl cytidine
  modified_base 18: mod_base = OTHER; note = 5-methyl cytidine
actcccactgtcctgaactg

SEQ ID NO: 524 - RNA, 20 nt, synthetic construct
  source 1..20: mol_type = other RNA
  modified_base 1..20: mod_base = OTHER; note = Phosphorothioate linkage
  modified_base 1..20: mod_base = OTHER; note = 2'-O-(2-methoxyethyl) ribonucleotide
  modified_base 5: mod_base = OTHER; note = 5-methyl cytidine
  modified_base 7..9: mod_base = OTHER; note = 5-methyl cytidine
  modified_base 11: mod_base = OTHER; note = 5-methyl cytidine
  modified_base 15..16: mod_base = OTHER; note = 5-methyl cytidine
aagactcccactgtcctgaa

SEQ ID NO: 525 - RNA, 20 nt, synthetic construct
  source 1..20: mol_type = other RNA
  modified_base 1..20: mod_base = OTHER; note = Phosphorothioate linkage
  modified_base 1..20: mod_base = OTHER; note = 2'-O-(2-methoxyethyl) ribonucleotide
  modified_base 10: mod_base = OTHER; note = 5-methyl cytidine
  modified_base 12..14: mod_base = OTHER; note = 5-methyl cytidine
  modified_base 16: mod_base = OTHER; note = 5-methyl cytidine
  modified_base 20: mod_base = OTHER; note = 5-methyl cytidine
tatgtaagactcccactgtc

SEQ ID NO: 526 - DNA, 20 bp, synthetic construct
  source 1..20: mol_type = other DNA
  modified_base 1..20: mod_base = OTHER; note = Phosphorothioate linkage
  modified_base 1..5: mod_base = OTHER; note = 2'-O-(2-methoxyethyl) ribonucleotide
  modified_base 6: mod_base = OTHER; note = locked nucleic acid
  misc_feature 7..8: note = DNA
  modified_base 9: mod_base = OTHER; note = locked nucleic acid
  misc_feature 10..11: note = DNA
  modified_base 12: mod_base = OTHER; note = locked nucleic acid
  misc_feature 13..14: note = DNA
  modified_base 15: mod_base = OTHER; note = locked nucleic acid
  misc_feature 16..20: note = DNA
  modified_base 4: mod_base = OTHER; note = 5-methyl cytidine
  modified_base 6: mod_base = OTHER; note = 5-methyl cytidine
  modified_base 12: mod_base = OTHER; note = 5-methyl cytidine
gttctccctagctgtgtagt

SEQ ID NO: 527 - RNA, 20 nt, synthetic construct
  source 1..20: mol_type = other RNA
  modified_base 1..20: mod_base = OTHER; note = Phosphorothioate linkage
  modified_base 1..3: mod_base = OTHER; note = 2'-O-(2-methoxyethyl) ribonucleotide
  modified_base 4: mod_base = OTHER; note = locked nucleic acid
  modified_base 5: mod_base = OTHER; note = 2'-O-(2-methoxyethyl) ribonucleotide
  modified_base 6: mod_base = OTHER; note = locked nucleic acid
  modified_base 7: mod_base = OTHER; note = 2'-O-(2-methoxyethyl) ribonucleotide
  modified_base 8: mod_base = OTHER; note = locked nucleic acid
  modified_base 9: mod_base = OTHER; note = 2'-O-(2-methoxyethyl) ribonucleotide
  modified_base 10: mod_base = OTHER; note = locked nucleic acid
  modified_base 11: mod_base = OTHER; note = 2'-O-(2-methoxyethyl) ribonucleotide
  modified_base 12: mod_base = OTHER; note = locked nucleic acid
  modified_base 13: mod_base = OTHER; note = 2'-O-(2-methoxyethyl) ribonucleotide
  modified_base 14: mod_base = OTHER; note = locked nucleic acid
  modified_base 15: mod_base = OTHER; note = 2'-O-(2-methoxyethyl) ribonucleotide
  modified_base 16: mod_base = OTHER; note = locked nucleic acid
  modified_base 17: mod_base = OTHER; note = 2'-O-(2-methoxyethyl) ribonucleotide
  modified_base 18: mod_base = OTHER; note = locked nucleic acid
  modified_base 19..20: mod_base = OTHER; note = 2'-O-(2-methoxyethyl) ribonucleotide
  modified_base 4: mod_base = OTHER; note = 5-methyl cytidine
  modified_base 6..8: mod_base = OTHER; note = 5-methyl cytidine
  modified_base 12: mod_base = OTHER; note = 5-methyl cytidine
gttctccctagctgtgtagt

SEQ ID NO: 528 - RNA, 20 nt, synthetic construct
  source 1..20: mol_type = other RNA
  modified_base 1..20: mod_base = OTHER; note = Phosphorothioate linkage
  modified_base 1..2: mod_base = OTHER; note = 2'-O-(2-methoxyethyl) ribonucleotide
  modified_base 3: mod_base = OTHER; note = locked nucleic acid
  modified_base 4: mod_base = OTHER; note = 2'-O-(2-methoxyethyl) ribonucleotide
  modified_base 5: mod_base = OTHER; note = locked nucleic acid
  modified_base 6: mod_base = OTHER; note = 2'-O-(2-methoxyethyl) ribonucleotide
  modified_base 7: mod_base = OTHER; note = locked nucleic acid
  modified_base 8: mod_base = OTHER; note = 2'-O-(2-methoxyethyl) ribonucleotide
  modified_base 9: mod_base = OTHER; note = locked nucleic acid
  modified_base 10: mod_base = OTHER; note = 2'-O-(2-methoxyethyl) ribonucleotide
  modified_base 11: mod_base = OTHER; note = locked nucleic acid
  modified_base 12: mod_base = OTHER; note = 2'-O-(2-methoxyethyl) ribonucleotide
  modified_base 13: mod_base = OTHER; note = locked nucleic acid
  modified_base 14: mod_base = OTHER; note = 2'-O-(2-methoxyethyl) ribonucleotide
  modified_base 15: mod_base = OTHER; note = locked nucleic acid
  modified_base 16: mod_base = OTHER; note = 2'-O-(2-methoxyethyl) ribonucleotide
  modified_base 17: mod_base = OTHER; note = locked nucleic acid
  modified_base 18..20: mod_base = OTHER; note = 2'-O-(2-methoxyethyl) ribonucleotide
  modified_base 4: mod_base = OTHER; note = 5-methyl cytidine
  modified_base 6..8: mod_base = OTHER; note = 5-methyl cytidine
  modified_base 12: mod_base = OTHER; note = 5-methyl cytidine
gttctccctagctgtgtagt

SEQ ID NO: 529 - RNA, 20 nt, synthetic construct
  source 1..20: mol_type = other RNA
  modified_base 1..20: mod_base = OTHER; note = Phosphorothioate linkage
  modified_base 1..2: mod_base = OTHER; note = 2'-O-(2-methoxyethyl) ribonucleotide
  modified_base 3: mod_base = OTHER; note = locked nucleic acid
  modified_base 4..5: mod_base = OTHER; note = 2'-O-(2-methoxyethyl) ribonucleotide
  modified_base 6: mod_base = OTHER; note = locked nucleic acid
  modified_base 7..8: mod_base = OTHER; note = 2'-O-(2-methoxyethyl) ribonucleotide
  modified_base 9: mod_base = OTHER; note = locked nucleic acid
  modified_base 10..11: mod_base = OTHER; note = 2'-O-(2-methoxyethyl) ribonucleotide
  modified_base 12: mod_base = OTHER; note = locked nucleic acid
  modified_base 13..14: mod_base = OTHER; note = 2'-O-(2-methoxyethyl) ribonucleotide
  modified_base 15: mod_base = OTHER; note = locked nucleic acid
  modified_base 16..17: mod_base = OTHER; note = 2'-O-(2-methoxyethyl) ribonucleotide
  modified_base 18: mod_base = OTHER; note = locked nucleic acid
  modified_base 19..20: mod_base = OTHER; note = 2'-O-(2-methoxyethyl) ribonucleotide
  modified_base 4: mod_base = OTHER; note = 5-methyl cytidine
  modified_base 6..8: mod_base = OTHER; note = 5-methyl cytidine
  modified_base 12: mod_base = OTHER; note = 5-methyl cytidine
gttctccctagctgtgtagt

SEQ ID NO: 530 - RNA, 20 nt, synthetic construct
  source 1..20: mol_type = other RNA
  modified_base 1..20: mod_base = OTHER; note = Phosphorothioate linkage
  modified_base 1..4: mod_base = OTHER; note = 2'-O-(2-methoxyethyl) ribonucleotide
  modified_base 5: mod_base = OTHER; note = locked nucleic acid
  modified_base 6..8: mod_base = OTHER; note = 2'-O-(2-methoxyethyl) ribonucleotide
  modified_base 9: mod_base = OTHER; note = locked nucleic acid
  modified_base 10..12: mod_base = OTHER; note = 2'-O-(2-methoxyethyl) ribonucleotide
  modified_base 13: mod_base = OTHER; note = locked nucleic acid
  modified_base 14..16: mod_base = OTHER; note = 2'-O-(2-methoxyethyl) ribonucleotide
  modified_base 17: mod_base = OTHER; note = locked nucleic acid
  modified_base 18..20: mod_base = OTHER; note = 2'-O-(2-methoxyethyl) ribonucleotide
  modified_base 4: mod_base = OTHER; note = 5-methyl cytidine
  modified_base 6..8: mod_base = OTHER; note = 5-methyl cytidine
  modified_base 12: mod_base = OTHER; note = 5-methyl cytidine
gttctccctagctgtgtagt

SEQ ID NO: 531 - RNA, 20 nt, synthetic construct
  source 1..20: mol_type = other RNA
  modified_base 1..20: mod_base = OTHER; note = Phosphorothioate linkage
  modified_base 1..3: mod_base = OTHER; note = 2'-O-(2-methoxyethyl) ribonucleotide
  modified_base 4: mod_base = OTHER; note = locked nucleic acid
  modified_base 5..7: mod_base = OTHER; note = 2'-O-(2-methoxyethyl) ribonucleotide
  modified_base 8: mod_base = OTHER; note = locked nucleic acid
  modified_base 9..11: mod_base = OTHER; note = 2'-O-(2-methoxyethyl) ribonucleotide
  modified_base 12: mod_base = OTHER; note = locked nucleic acid
  modified_base 13..15: mod_base = OTHER; note = 2'-O-(2-methoxyethyl) ribonucleotide
  modified_base 16: mod_base = OTHER; note = locked nucleic acid
  modified_base 17..20: mod_base = OTHER; note = 2'-O-(2-methoxyethyl) ribonucleotide
  modified_base 4: mod_base = OTHER; note = 5-methyl cytidine
  modified_base 6..8: mod_base = OTHER; note = 5-methyl cytidine
  modified_base 12: mod_base = OTHER; note = 5-methyl cytidine
gttctccctagctgtgtagt

SEQ ID NO: 532 - RNA, 20 nt, synthetic construct
  source 1..20: mol_type = other RNA
  modified_base 1..20: mod_base = OTHER; note = Phosphorothioate linkage
  modified_base 1..5: mod_base = OTHER; note = 2'-O-(2-methoxyethyl) ribonucleotide
  modified_base 6: mod_base = OTHER; note = locked nucleic acid
  modified_base 7..10: mod_base = OTHER; note = 2'-O-(2-methoxyethyl) ribonucleotide
  modified_base 11: mod_base = OTHER; note = locked nucleic acid
  modified_base 12..15: mod_base = OTHER; note = 2'-O-(2-methoxyethyl) ribonucleotide
  modified_base 16: mod_base = OTHER; note = locked nucleic acid
  modified_base 17..20: mod_base = OTHER; note = 2'-O-(2-methoxyethyl) ribonucleotide
  modified_base 4: mod_base = OTHER; note = 5-methyl cytidine
  modified_base 6..8: mod_base = OTHER; note = 5-methyl cytidine
  modified_base 12: mod_base = OTHER; note = 5-methyl cytidine
gttctccctagctgtgtagt

SEQ ID NO: 533 - RNA, 20 nt, synthetic construct
  source 1..20: mol_type = other RNA
  modified_base 1..20: mod_base = OTHER; note = Phosphorothioate linkage
  modified_base 1..4: mod_base = OTHER; note = 2'-O-(2-methoxyethyl) ribonucleotide
  modified_base 5: mod_base = OTHER; note = locked nucleic acid
  modified_base 6..9: mod_base = OTHER; note = 2'-O-(2-methoxyethyl) ribonucleotide
  modified_base 10: mod_base = OTHER; note = locked nucleic acid
  modified_base 11..14: mod_base = OTHER; note = 2'-O-(2-methoxyethyl) ribonucleotide
  modified_base 15: mod_base = OTHER; note = locked nucleic acid
  modified_base 16..20: mod_base = OTHER; note = 2'-O-(2-methoxyethyl) ribonucleotide
  modified_base 4: mod_base = OTHER; note = 5-methyl cytidine
  modified_base 6..8: mod_base = OTHER; note = 5-methyl cytidine
  modified_base 12: mod_base = OTHER; note = 5-methyl cytidine
gttctccctagctgtgtagt

SEQ ID NO: 534 - DNA, 20 bp, synthetic construct
  source 1..20: mol_type = other DNA
  modified_base 1..20: mod_base = OTHER; note = Phosphorothioate linkage
  modified_base 1..5: mod_base = OTHER; note = 2'-O-(2-methoxyethyl) ribonucleotide
  modified_base 6: mod_base = OTHER; note = locked nucleic acid
  misc_feature 7..8: note = DNA
  modified_base 9: mod_base = OTHER; note = locked nucleic acid
  misc_feature 10..11: note = DNA
  modified_base 12: mod_base = OTHER; note = locked nucleic acid
  misc_feature 13..14: note = DNA
  modified_base 15: mod_base = OTHER; note = locked nucleic acid
  modified_base 16..20: mod_base = OTHER; note = 2'-O-(2-methoxyethyl) ribonucleotide
  modified_base 1..2: mod_base = OTHER; note = 5-methyl cytidine
  modified_base 15: mod_base = OTHER; note = 5-methyl cytidine
  modified_base 19..20: mod_base = OTHER; note = 5-methyl cytidine
cctgaactgtatggctgacc

SEQ ID NO: 535 - RNA, 20 nt, synthetic construct
  source 1..20: mol_type = other RNA
  modified_base 1..20: mod_base = OTHER; note = Phosphorothioate linkage
  modified_base 1..3: mod_base = OTHER; note = 2'-O-(2-methoxyethyl) ribonucleotide
  modified_base 4: mod_base = OTHER; note = locked nucleic acid
  modified_base 5: mod_base = OTHER; note = 2'-O-(2-methoxyethyl) ribonucleotide
  modified_base 6: mod_base = OTHER; note = locked nucleic acid
  modified_base 7: mod_base = OTHER; note = 2'-O-(2-methoxyethyl) ribonucleotide
  modified_base 8: mod_base = OTHER; note = locked nucleic acid
  modified_base 9: mod_base = OTHER; note = 2'-O-(2-methoxyethyl) ribonucleotide
  modified_base 10: mod_base = OTHER; note = locked nucleic acid
  modified_base 11: mod_base = OTHER; note = 2'-O-(2-methoxyethyl) ribonucleotide
  modified_base 12: mod_base = OTHER; note = locked nucleic acid
  modified_base 13: mod_base = OTHER; note = 2'-O-(2-methoxyethyl) ribonucleotide
  modified_base 14: mod_base = OTHER; note = locked nucleic acid
  modified_base 15: mod_base = OTHER; note = 2'-O-(2-methoxyethyl) ribonucleotide
  modified_base 16: mod_base = OTHER; note = locked nucleic acid
  modified_base 17: mod_base = OTHER; note = 2'-O-(2-methoxyethyl) ribonucleotide
  modified_base 18: mod_base = OTHER; note = locked nucleic acid
  modified_base 19..20: mod_base = OTHER; note = 2'-O-(2-methoxyethyl) ribonucleotide
  modified_base 1..2: mod_base = OTHER; note = 5-methyl cytidine
  modified_base 7: mod_base = OTHER; note = 5-methyl cytidine
  modified_base 15: mod_base = OTHER; note = 5-methyl cytidine
  modified_base 19..20: mod_base = OTHER; note = 5-methyl cytidine
cctgaactgtatggctgacc

SEQ ID NO: 536 - RNA, 20 nt, synthetic construct
  source 1..20: mol_type = other RNA
  modified_base 1..20: mod_base = OTHER; note = Phosphorothioate linkage
  modified_base 1..2: mod_base = OTHER; note = 2'-O-(2-methoxyethyl) ribonucleotide
  modified_base 3: mod_base = OTHER; note = locked nucleic acid
  modified_base 4: mod_base = OTHER; note = 2'-O-(2-methoxyethyl) ribonucleotide
  modified_base 5: mod_base = OTHER; note = locked nucleic acid
  modified_base 6: mod_base = OTHER; note = 2'-O-(2-methoxyethyl) ribonucleotide
  modified_base 7: mod_base = OTHER; note = locked nucleic acid
  modified_base 8: mod_base = OTHER; note = 2'-O-(2-methoxyethyl) ribonucleotide
  modified_base 9: mod_base = OTHER; note = locked nucleic acid
  modified_base 10: mod_base = OTHER; note = 2'-O-(2-methoxyethyl) ribonucleotide
  modified_base 11: mod_base = OTHER; note = locked nucleic acid
  modified_base 12: mod_base = OTHER; note = 2'-O-(2-methoxyethyl) ribonucleotide
  modified_base 13: mod_base = OTHER; note = locked nucleic acid
  modified_base 14: mod_base = OTHER; note = 2'-O-(2-methoxyethyl) ribonucleotide
  modified_base 15: mod_base = OTHER; note = locked nucleic acid
  modified_base 16: mod_base = OTHER; note = 2'-O-(2-methoxyethyl) ribonucleotide
  modified_base 17: mod_base = OTHER; note = locked nucleic acid
  modified_base 18..20: mod_base = OTHER; note = 2'-O-(2-methoxyethyl) ribonucleotide
  modified_base 1..2: mod_base = OTHER; note = 5-methyl cytidine
  modified_base 7: mod_base = OTHER; note = 5-methyl cytidine
  modified_base 15: mod_base = OTHER; note = 5-methyl cytidine
  modified_base 19..20: mod_base = OTHER; note = 5-methyl cytidine
cctgaactgtatggctgacc

SEQ ID NO: 537 - RNA, 20 nt, synthetic construct
  source 1..20: mol_type = other RNA
  modified_base 1..20: mod_base = OTHER; note = Phosphorothioate linkage
  modified_base 1..2: mod_base = OTHER; note = 2'-O-(2-methoxyethyl) ribonucleotide
  modified_base 3: mod_base = OTHER; note = locked nucleic acid
  modified_base 4..5: mod_base = OTHER; note = 2'-O-(2-methoxyethyl) ribonucleotide
  modified_base 6: mod_base = OTHER; note = locked nucleic acid
  modified_base 7..8: mod_base = OTHER; note = 2'-O-(2-methoxyethyl) ribonucleotide
  modified_base 9: mod_base = OTHER; note = locked nucleic acid
  modified_base 10..11: mod_base = OTHER; note = 2'-O-(2-methoxyethyl) ribonucleotide
  modified_base 12: mod_base = OTHER; note = locked nucleic acid
  modified_base 13..14: mod_base = OTHER; note = 2'-O-(2-methoxyethyl) ribonucleotide
  modified_base 15: mod_base = OTHER; note = locked nucleic acid
  modified_base 16..17: mod_base = OTHER; note = 2'-O-(2-methoxyethyl) ribonucleotide
  modified_base 18: mod_base = OTHER; note = locked nucleic acid
  modified_base 19..20: mod_base = OTHER; note = 2'-O-(2-methoxyethyl) ribonucleotide
  modified_base 1..2: mod_base = OTHER; note = 5-methyl cytidine
  modified_base 7: mod_base = OTHER; note = 5-methyl cytidine
  modified_base 15: mod_base = OTHER; note = 5-methyl cytidine
  modified_base 19..20: mod_base = OTHER; note = 5-methyl cytidine
cctgaactgtatggctgacc

SEQ ID NO: 538 - RNA, 20 nt, synthetic construct
  source 1..20: mol_type = other RNA
  modified_base 1..20: mod_base = OTHER; note = Phosphorothioate linkage
  modified_base 1..4: mod_base = OTHER; note = 2'-O-(2-methoxyethyl) ribonucleotide
  modified_base 5: mod_base = OTHER; note = locked nucleic acid
  modified_base 6..8: mod_base = OTHER; note = 2'-O-(2-methoxyethyl) ribonucleotide
  modified_base 9: mod_base = OTHER; note = locked nucleic acid
  modified_base 10..12: mod_base = OTHER; note = 2'-O-(2-methoxyethyl) ribonucleotide
  modified_base 13: mod_base = OTHER; note = locked nucleic acid
  modified_base 14..16: mod_base = OTHER; note = 2'-O-(2-methoxyethyl) ribonucleotide
  modified_base 17: mod_base = OTHER; note = locked nucleic acid
  modified_base 18..20: mod_base = OTHER; note = 2'-O-(2-methoxyethyl) ribonucleotide
  modified_base 1..2: mod_base = OTHER; note = 5-methyl cytidine
  modified_base 7: mod_base = OTHER; note = 5-methyl cytidine
  modified_base 15: mod_base = OTHER; note = 5-methyl cytidine
  modified_base 19..20: mod_base = OTHER; note = 5-methyl cytidine
cctgaactgtatggctgacc

SEQ ID NO: 539 - RNA, 20 nt, synthetic construct
  source 1..20: mol_type = other RNA
  modified_base 1..20: mod_base = OTHER; note = Phosphorothioate linkage
  modified_base 1..3: mod_base = OTHER; note = 2'-O-(2-methoxyethyl) ribonucleotide
  modified_base 4: mod_base = OTHER; note = locked nucleic acid
  modified_base 5..7: mod_base = OTHER; note = 2'-O-(2-methoxyethyl) ribonucleotide
  modified_base 8: mod_base = OTHER; note = locked nucleic acid
  modified_base 9..11: mod_base = OTHER; note = 2'-O-(2-methoxyethyl) ribonucleotide
  modified_base 12: mod_base = OTHER; note = locked nucleic acid
  modified_base 13..15: mod_base = OTHER; note = 2'-O-(2-methoxyethyl) ribonucleotide
  modified_base 16: mod_base = OTHER; note = locked nucleic acid
  modified_base 17..20: mod_base = OTHER; note = 2'-O-(2-methoxyethyl) ribonucleotide
  modified_base 1..2: mod_base = OTHER; note = 5-methyl cytidine
  modified_base 7: mod_base = OTHER; note = 5-methyl cytidine
  modified_base 15: mod_base = OTHER; note = 5-methyl cytidine
  modified_base 19..20: mod_base = OTHER; note = 5-methyl cytidine
cctgaactgtatggctgacc

SEQ ID NO: 540 - RNA, 20 nt, synthetic construct
  source 1..20: mol_type = other RNA
  modified_base 1..20: mod_base = OTHER; note = Phosphorothioate linkage
  modified_base 1..5: mod_base = OTHER; note = 2'-O-(2-methoxyethyl) ribonucleotide
  modified_base 6: mod_base = OTHER; note = locked nucleic acid
  modified_base 7..10: mod_base = OTHER; note = 2'-O-(2-methoxyethyl) ribonucleotide
  modified_base 11: mod_base = OTHER; note = locked nucleic acid
  modified_base 12..15: mod_base = OTHER; note = 2'-O-(2-methoxyethyl) ribonucleotide
  modified_base 16: mod_base = OTHER; note = locked nucleic acid
  modified_base 17..20: mod_base = OTHER; note = 2'-O-(2-methoxyethyl) ribonucleotide
  modified_base 1..2: mod_base = OTHER; note = 5-methyl cytidine
  modified_base 7: mod_base = OTHER; note = 5-methyl cytidine
  modified_base 15: mod_base = OTHER; note = 5-methyl cytidine
  modified_base 19..20: mod_base = OTHER; note = 5-methyl cytidine
cctgaactgtatggctgacc

SEQ ID NO: 541 - RNA, 20 nt, synthetic construct
  source 1..20: mol_type = other RNA
  modified_base 1..20: mod_base = OTHER; note = Phosphorothioate linkage
  modified_base 1..4: mod_base = OTHER; note = 2'-O-(2-methoxyethyl) ribonucleotide
  modified_base 5: mod_base = OTHER; note = locked nucleic acid
  modified_base 6..9: mod_base = OTHER; note = 2'-O-(2-methoxyethyl) ribonucleotide
  modified_base 10: mod_base = OTHER; note = locked nucleic acid
  modified_base 11..14: mod_base = OTHER; note = 2'-O-(2-methoxyethyl) ribonucleotide
  modified_base 15: mod_base = OTHER; note = locked nucleic acid
  modified_base 16..20: mod_base = OTHER; note = 2'-O-(2-methoxyethyl) ribonucleotide
  modified_base 1..2: mod_base = OTHER; note = 5-methyl cytidine
  modified_base 7: mod_base = OTHER; note = 5-methyl cytidine
  modified_base 15: mod_base = OTHER; note = 5-methyl cytidine
  modified_base 19..20: mod_base = OTHER; note = 5-methyl cytidine
cctgaactgtatggctgacc

SEQ ID NO: 542 - RNA, 22 nt, synthetic construct
  source 1..22: mol_type = other RNA
  modified_base 1..22: mod_base = OTHER; note = Phosphorothioate linkage
  modified_base 1..5: mod_base = OTHER; note = 2'-O-(2-methoxyethyl) ribonucleotide
  misc_feature 6: note = DNA
  modified_base 7: mod_base = OTHER; note = 2'-O-(2-methoxyethyl) ribonucleotide
  misc_feature 8..9: note = DNA
  modified_base 10: mod_base = OTHER; note = 2'-O-(2-methoxyethyl) ribonucleotide
  misc_feature 11..12: note = DNA
  modified_base 13: mod_base = OTHER; note = 2'-O-(2-methoxyethyl) ribonucleotide
  misc_feature 14..15: note = DNA
  modified_base 16: mod_base = OTHER; note = 2'-O-(2-methoxyethyl) ribonucleotide
  misc_feature 17: note = DNA
  modified_base 18..22: mod_base = OTHER; note = 2'-O-(2-methoxyethyl) ribonucleotide
  modified_base 5: mod_base = OTHER; note = 5-methyl cytidine
  modified_base 7: mod_base = OTHER; note = 5-methyl cytidine
  modified_base 13: mod_base = OTHER; note = 5-methyl cytidine
agttctccctagctgtgtagtg

SEQ ID NO: 543 - RNA, 22 nt, synthetic construct
  source 1..22: mol_type = other RNA
  modified_base 1..22: mod_base = OTHER; note = Phosphorothioate linkage
  modified_base 1..6: mod_base = OTHER; note = 2'-O-(2-methoxyethyl) ribonucleotide
  modified_base 7: mod_base = OTHER; note = locked nucleic acid
  modified_base 8..9: mod_base = OTHER; note = 2'-O-(2-methoxyethyl) ribonucleotide
  modified_base 10: mod_base = OTHER; note = locked nucleic acid
  modified_base 11..12: mod_base = OTHER; note = 2'-O-(2-methoxyethyl) ribonucleotide
  modified_base 13: mod_base = OTHER; note = locked nucleic acid
  modified_base 14..15: mod_base = OTHER; note = 2'-O-(2-methoxyethyl) ribonucleotide
  modified_base 16: mod_base = OTHER; note = locked nucleic acid
  modified_base 17..22: mod_base = OTHER; note = 2'-O-(2-methoxyethyl) ribonucleotide
  modified_base 5: mod_base = OTHER; note = 5-methyl cytidine
  modified_base 7..9: mod_base = OTHER; note = 5-methyl cytidine
  modified_base 13: mod_base = OTHER; note = 5-methyl cytidine
agttctccctagctgtgtagtg

SEQ ID NO: 544 - RNA, 24 nt, synthetic construct
  source 1..24: mol_type = other RNA
  modified_base 1..24: mod_base = OTHER; note = Phosphorothioate linkage
  modified_base 1..5: mod_base = OTHER; note = 2'-O-(2-methoxyethyl) ribonucleotide
  misc_feature 6..7: note = DNA
  modified_base 8: mod_base = OTHER; note = 2'-O-(2-methoxyethyl) ribonucleotide
  misc_feature 9..10: note = DNA
  modified_base 11: mod_base = OTHER; note = 2'-O-(2-methoxyethyl) ribonucleotide
  misc_feature 12..13: note = DNA
  modified_base 14: mod_base = OTHER; note = 2'-O-(2-methoxyethyl) ribonucleotide
  misc_feature 15..16: note = DNA
  modified_base 17: mod_base = OTHER; note = 2'-O-(2-methoxyethyl) ribonucleotide
  misc_feature 18..19: note = DNA
  modified_base 20..24: mod_base = OTHER; note = 2'-O-(2-methoxyethyl) ribonucleotide
  modified_base 1: mod_base = OTHER; note = 5-methyl cytidine
  modified_base 8: mod_base = OTHER; note = 5-methyl cytidine
  modified_base 14: mod_base = OTHER; note = 5-methyl cytidine
cagttctccctagctgtgtagtgt

SEQ ID NO: 545 - RNA, 24 nt, synthetic construct
  source 1..24: mol_type = other RNA
  modified_base 1..24: mod_base = OTHER; note = Phosphorothioate linkage
  modified_base 1..7: mod_base = OTHER; note = 2'-O-(2-methoxyethyl) ribonucleotide
  modified_base 8: mod_base = OTHER; note = locked nucleic acid
  modified_base 9..10: mod_base = OTHER; note = 2'-O-(2-methoxyethyl) ribonucleotide
  modified_base 11: mod_base = OTHER; note = locked nucleic acid
  modified_base 12..13: mod_base = OTHER; note = 2'-O-(2-methoxyethyl) ribonucleotide
  modified_base 14: mod_base = OTHER; note = locked nucleic acid
  modified_base 15..16: mod_base = OTHER; note = 2'-O-(2-methoxyethyl) ribonucleotide
  modified_base 17: mod_base = OTHER; note = locked nucleic acid
  modified_base 18..22: mod_base = OTHER; note = 2'-O-(2-methoxyethyl) ribonucleotide
  modified_base 1: mod_base = OTHER; note = 5-methyl cytidine
  modified_base 6: mod_base = OTHER; note = 5-methyl cytidine
  modified_base 8..10: mod_base = OTHER; note = 5-methyl cytidine
  modified_base 14: mod_base = OTHER; note = 5-methyl cytidine
cagttctccctagctgtgtagtgt

SEQ ID NO: 546 - RNA, 20 nt, synthetic construct
  source 1..20: mol_type = other RNA
  modified_base 1..20: mod_base = OTHER; note = Phosphorothioate linkage
  modified_base 1..20: mod_base = OTHER; note = 2'-O-(2-methoxyethyl) ribonucleotide
  modified_base 2..3: mod_base = OTHER; note = 5-methyl cytidine
  modified_base 5: mod_base = OTHER; note = 5-methyl cytidine
  modified_base 9: mod_base = OTHER; note = 5-methyl cytidine
  modified_base 11..12: mod_base = OTHER; note = 5-methyl cytidine
  modified_base 17..18: mod_base = OTHER; note = 5-methyl cytidine
acctctgtctccaggtccgg

SEQ ID NO: 547 - RNA, 20 nt, synthetic construct
  source 1..20: mol_type = other RNA
  modified_base 1..20: mod_base = OTHER; note = Phosphorothioate linkage
  modified_base 1..20: mod_base = OTHER; note = 2'-O-(2-methoxyethyl) ribonucleotide
  modified_base 6: mod_base = OTHER; note = 5-methyl cytidine
  modified_base 16..17: mod_base = OTHER; note = 5-methyl cytidine
  modified_base 20: mod_base = OTHER; note = 5-methyl cytidine
agagacaagagaagacctgc

SEQ ID NO: 548 - RNA, 20 nt, synthetic construct
  source 1..20: mol_type = other RNA
  modified_base 1..20: mod_base = OTHER; note = Phosphorothioate linkage
  modified_base 1..20: mod_base = OTHER; note = 2'-O-(2-methoxyethyl) ribonucleotide
  modified_base 1: mod_base = OTHER; note = 5-methyl cytidine
  modified_base 8..9: mod_base = OTHER; note = 5-methyl cytidine
  modified_base 18..20: mod_base = OTHER; note = 5-methyl cytidine
caagtaaccaatggaagccc

SEQ ID NO: 549 - RNA, 20 nt, synthetic construct
  source 1..20: mol_type = other RNA
  modified_base 1..20: mod_base = OTHER; note = Phosphorothioate linkage
  modified_base 1..20: mod_base = OTHER; note = 2'-O-(2-methoxyethyl) ribonucleotide
  modified_base 1: mod_base = OTHER; note = 5-methyl cytidine
  modified_base 3: mod_base = OTHER; note = 5-methyl cytidine
  modified_base 9..11: mod_base = OTHER; note = 5-methyl cytidine
cacatgatccctagaaatgg

SEQ ID NO: 550 - RNA, 20 nt, synthetic construct
  source 1..20: mol_type = other RNA
  modified_base 1..20: mod_base = OTHER; note = Phosphorothioate linkage
  modified_base 1..20: mod_base = OTHER; note = 2'-O-(2-methoxyethyl) ribonucleotide
  modified_base 1..2: mod_base = OTHER; note = 5-methyl cytidine
  modified_base 8: mod_base = OTHER; note = 5-methyl cytidine
  modified_base 12: mod_base = OTHER; note = 5-methyl cytidine
  modified_base 14..16: mod_base = OTHER; note = 5-methyl cytidine
  modified_base 18..19: mod_base = OTHER; note = 5-methyl cytidine
ccagaagcagacaccctcca

SEQ ID NO: 551 - RNA, 20 nt, synthetic construct
  source 1..20: mol_type = other RNA
  modified_base 1..20: mod_base = OTHER; note = Phosphorothioate linkage
  modified_base 1..20: mod_base = OTHER; note = 2'-O-(2-methoxyethyl) ribonucleotide
  modified_base 11: mod_base = OTHER; note = 5-methyl cytidine
  modified_base 13: mod_base = OTHER; note = 5-methyl cytidine
  modified_base 16: mod_base = OTHER; note = 5-methyl cytidine
  modified_base 19..20: mod_base = OTHER; note = 5-methyl cytidine
ggatttaaatctcttcttcc

SEQ ID NO: 552 - RNA, 20 nt, synthetic construct
  source 1..20: mol_type = other RNA
  modified_base 1..20: mod_base = OTHER; note = Phosphorothioate linkage
  modified_base 1..20: mod_base = OTHER; note = 2'-O-(2-methoxyethyl) ribonucleotide
  modified_base 2: mod_base = OTHER; note = 5-methyl cytidine
  modified_base 7..8: mod_base = OTHER; note = 5-methyl cytidine
  modified_base 12: mod_base = OTHER; note = 5-methyl cytidine
  modified_base 16: mod_base = OTHER; note = 5-methyl cytidine
gcatttcctgtctttcatag

SEQ ID NO: 553 - RNA, 20 nt, synthetic construct
  source 1..20: mol_type = other RNA
  modified_base 1..20: mod_base = OTHER; note = Phosphorothioate linkage
  modified_base 1..20: mod_base = OTHER; note = 2'-O-(2-methoxyethyl) ribonucleotide
  modified_base 1: mod_base = OTHER; note = 5-methyl cytidine
  modified_base 14: mod_base = OTHER; note = 5-methyl cytidine
  modified_base 19..20: mod_base = OTHER; note = 5-methyl cytidine
catgtgtgggtggcatttcc

SEQ ID NO: 554 - RNA, 20 nt, synthetic construct
  source 1..20: mol_type = other RNA
  modified_base 1..20: mod_base = OTHER; note = Phosphorothioate linkage
  modified_base 1..20: mod_base = OTHER; note = 2'-O-(2-methoxyethyl) ribonucleotide
  modified_base 3: mod_base = OTHER; note = 5-methyl cytidine
  modified_base 5: mod_base = OTHER; note = 5-methyl cytidine
  modified_base 9: mod_base = OTHER; note = 5-methyl cytidine
  modified_base 12..14: mod_base = OTHER; note = 5-methyl cytidine
  modified_base 16..17: mod_base = OTHER; note = 5-methyl cytidine
  modified_base 20: mod_base = OTHER; note = 5-methyl cytidine
ggcacttgcaaccctcctac

SEQ ID NO: 555 - RNA, 20 nt, synthetic construct
  source 1..20: mol_type = other RNA
  modified_base 1..20: mod_base = OTHER; note = Phosphorothioate linkage
  modified_base 1..20: mod_base = OTHER; note = 2'-O-(2-methoxyethyl) ribonucleotide
  modified_base 6: mod_base = OTHER; note = 5-methyl cytidine
  modified_base 8..9: mod_base = OTHER; note = 5-methyl cytidine
  modified_base 16..18: mod_base = OTHER; note = 5-methyl cytidine
ggattcaccttatagcccaa

SEQ ID NO: 556 - RNA, 20 nt, synthetic construct
  source 1..20: mol_type = other RNA
  modified_base 1..20: mod_base = OTHER; note = Phosphorothioate linkage
  modified_base 1..20: mod_base = OTHER; note = 2'-O-(2-methoxyethyl) ribonucleotide
  modified_base 2..3: mod_base = OTHER; note = 5-methyl cytidine
  modified_base 5: mod_base = OTHER; note = 5-methyl cytidine
  modified_base 9: mod_base = OTHER; note = 5-methyl cytidine
  modified_base 11..12: mod_base = OTHER; note = 5-methyl cytidine
  modified_base 17..18: mod_base = OTHER; note = 5-methyl cytidine
gatggcagatccttctatgt

SEQ ID NO: 557 - RNA, 20 nt, synthetic construct
  source 1..20: mol_type = other RNA
  modified_base 1..20: mod_base = OTHER; note = Phosphorothioate linkage
  modified_base 1..20: mod_base = OTHER; note = 2'-O-(2-methoxyethyl) ribonucleotide
  modified_base 8: mod_base = OTHER; note = 5-methyl cytidine
ggatgttctttgaattaggt

SEQ ID NO: 558 - RNA, 20 nt, synthetic construct
  source 1..20: mol_type = other RNA
  modified_base 1..20: mod_base = OTHER; note = Phosphorothioate linkage
  modified_base 1..20: mod_base = OTHER; note = 2'-O-(2-methoxyethyl) ribonucleotide
  modified_base 7..8: mod_base = OTHER; note = 5-methyl cytidine
  modified_base 10: mod_base = OTHER; note = 5-methyl cytidine
  modified_base 20: mod_base = OTHER; note = 5-methyl cytidine
agatggcctctgggatgttc

SEQ ID NO: 559 - RNA, 20 nt, synthetic construct
  source 1..20: mol_type = other RNA
  modified_base 1..20: mod_base = OTHER; note = Phosphorothioate linkage
  modified_base 1..20: mod_base = OTHER; note = 2'-O-(2-methoxyethyl) ribonucleotide
  modified_base 1..3: mod_base = OTHER; note = 5-methyl cytidine
  modified_base 6..9: mod_base = OTHER; note = 5-methyl cytidine
  modified_base 12..13: mod_base = OTHER; note = 5-methyl cytidine
ccctaccccttcctggttag

SEQ ID NO: 560 - RNA, 20 nt, synthetic construct
  source 1..20: mol_type = other RNA
  modified_base 1..20: mod_base = OTHER; note = Phosphorothioate linkage
  modified_base 1..20: mod_base = OTHER; note = 2'-O-(2-methoxyethyl) ribonucleotide
  modified_base 1: mod_base = OTHER; note = 5-methyl cytidine
  modified_base 5..8: mod_base = OTHER; note = 5-methyl cytidine
  modified_base 20: mod_base = OTHER; note = 5-methyl cytidine
ctagccccgttgagaggaac

SEQ ID NO: 561 - RNA, 20 nt, synthetic construct
  source 1..20: mol_type = other RNA
  modified_base 1..20: mod_base = OTHER; note = Phosphorothioate linkage
  modified_base 1..20: mod_base = OTHER; note = 2'-O-(2-methoxyethyl) ribonucleotide
  modified_base 2: mod_base = OTHER; note = 5-methyl cytidine
  modified_base 4..5: mod_base = OTHER; note = 5-methyl cytidine
  modified_base 7: mod_base = OTHER; note = 5-methyl cytidine
  modified_base 9..11: mod_base = OTHER; note = 5-methyl cytidine
  modified_base 15..18: mod_base = OTHER; note = 5-methyl cytidine
tcaccactccctagccccgt

SEQ ID NO: 562 - RNA, 20 nt, synthetic construct
  source 1..20: mol_type = other RNA
  modified_base 1..20: mod_base = OTHER; note = Phosphorothioate linkage
  modified_base 1..20: mod_base = OTHER; note = 2'-O-(2-methoxyethyl) ribonucleotide
  modified_base 2..3: mod_base = OTHER; note = 5-methyl cytidine
  modified_base 16..17: mod_base = OTHER; note = 5-methyl cytidine
gtagtgtagaggtggccagg

SEQ ID NO: 563 - RNA, 20 nt, synthetic construct
  source 1..20: mol_type = other RNA
  modified_base 1..20: mod_base = OTHER; note = Phosphorothioate linkage
  modified_base 1..20: mod_base = OTHER; note = 2'-O-(2-methoxyethyl) ribonucleotide
  modified_base 2: mod_base = OTHER; note = 5-methyl cytidine
gctgtgtagtgtagaggtgg

SEQ ID NO: 564 - RNA, 20 nt, synthetic construct
  source 1..20: mol_type = other RNA
  modified_base 1..20: mod_base = OTHER; note = Phosphorothioate linkage
  modified_base 1..20: mod_base = OTHER; note = 2'-O-(2-methoxyethyl) ribonucleotide
  modified_base 1..3: mod_base = OTHER; note = 5-methyl cytidine
  modified_base 7: mod_base = OTHER; note = 5-methyl cytidine
ccctagctgtgtagtgtaga

SEQ ID NO: 565 - RNA, 20 nt, synthetic construct
  source 1..20: mol_type = other RNA
  modified_base 1..20: mod_base = OTHER; note = Phosphorothioate linkage
  modified_base 1..20: mod_base = OTHER; note = 2'-O-(2-methoxyethyl) ribonucleotide
  modified_base 1: mod_base = OTHER; note = 5-methyl cytidine
  modified_base 3..5: mod_base = OTHER; note = 5-methyl cytidine
  modified_base 9: mod_base = OTHER; note = 5-methyl cytidine
ctccctagctgtgtagtgta

SEQ ID NO: 566 - RNA, 20 nt, synthetic construct
  source 1..20: mol_type = other RNA
  modified_base 1..20: mod_base = OTHER; note = Phosphorothioate linkage
  modified_base 1..20: mod_base = OTHER; note = 2'-O-(2-methoxyethyl) ribonucleotide
  modified_base 2: mod_base = OTHER; note = 5-methyl cytidine
  modified_base 4..6: mod_base = OTHER; note = 5-methyl cytidine
  modified_base 10: mod_base = OTHER; note = 5-methyl cytidine
tctccctagctgtgtagtgt

SEQ ID NO: 567 - RNA, 20 nt, synthetic construct
  source 1..20: mol_type = other RNA
  modified_base 1..3: mod_base = OTHER; note = Phosphorothioate linkage
  modified_base 5..16: mod_base = OTHER; note = Phosphorothioate linkage
  modified_base 18..20: mod_base = OTHER; note = Phosphorothioate linkage
  modified_base 1..20: mod_base = OTHER; note = 2'-O-(2-methoxyethyl) ribonucleotide
  modified_base 4: mod_base = OTHER; note = 5-methyl cytidine
  modified_base 6..8: mod_base = OTHER; note = 5-methyl cytidine
  modified_base 12: mod_base = OTHER; note = 5-methyl cytidine
gttctccctagctgtgtagt

SEQ ID NO: 568 - RNA, 20 nt, synthetic construct
  source 1..20: mol_type = other RNA
  modified_base 1..3: mod_base = OTHER; note = Phosphorothioate linkage
  modified_base 7..14: mod_base = OTHER; note = Phosphorothioate linkage
  modified_base 18..20: mod_base = OTHER; note = Phosphorothioate linkage
  modified_base 1..20: mod_base = OTHER; note = 2'-O-(2-methoxyethyl) ribonucleotide
  modified_base 4: mod_base = OTHER; note = 5-methyl cytidine
  modified_base 6..8: mod_base = OTHER; note = 5-methyl cytidine
  modified_base 12: mod_base = OTHER; note = 5-methyl cytidine
gttctccctagctgtgtagt

SEQ ID NO: 569 - RNA, 20 nt, synthetic construct
  source 1..20: mol_type = other RNA
  modified_base 1..3: mod_base = OTHER; note = Phosphorothioate linkage
  modified_base 18..20: mod_base = OTHER; note = Phosphorothioate linkage
  modified_base 1..20: mod_base = OTHER; note = 2'-O-(2-methoxyethyl) ribonucleotide
  modified_base 4: mod_base = OTHER; note = 5-methyl cytidine
  modified_base 6..8: mod_base = OTHER; note = 5-methyl cytidine
  modified_base 12: mod_base = OTHER; note = 5-methyl cytidine
gttctccctagctgtgtagt

SEQ ID NO: 570 - RNA, 20 nt, synthetic construct
  source 1..20: mol_type = other RNA
  modified_base 1..3: mod_base = OTHER; note = Phosphorothioate linkage
  modified_base 5..16: mod_base = OTHER; note = Phosphorothioate linkage
  modified_base 18..20: mod_base = OTHER; note = Phosphorothioate linkage
  modified_base 1..20: mod_base = OTHER; note = 2'-O-(2-methoxyethyl) ribonucleotide
  modified_base 1..2: mod_base = OTHER; note = 5-methyl cytidine
  modified_base 7: mod_base = OTHER; note = 5-methyl cytidine
  modified_base 15: mod_base = OTHER; note = 5-methyl cytidine
  modified_base 19..20: mod_base = OTHER; note = 5-methyl cytidine
cctgaactgtatggctgacc

SEQ ID NO: 571 - RNA, 20 nt, synthetic construct
  source 1..20: mol_type = other RNA
  modified_base 1..3: mod_base = OTHER; note = Phosphorothioate linkage
  modified_base 7..14: mod_base = OTHER; note = Phosphorothioate linkage
  modified_base 18..20: mod_base = OTHER; note = Phosphorothioate linkage
  modified_base 1..20: mod_base = OTHER; note = 2'-O-(2-methoxyethyl) ribonucleotide
  modified_base 1..2: mod_base = OTHER; note = 5-methyl cytidine
  modified_base 7: mod_base = OTHER; note = 5-methyl cytidine
  modified_base 15: mod_base = OTHER; note = 5-methyl cytidine
  modified_base 19..20: mod_base = OTHER; note = 5-methyl cytidine
cctgaactgtatggctgacc

SEQ ID NO: 572 - RNA, 20 nt, synthetic construct
  source 1..20: mol_type = other RNA
  modified_base 1..3: mod_base = OTHER; note = Phosphorothioate linkage
  modified_base 18..20: mod_base = OTHER; note = Phosphorothioate linkage
  modified_base 1..20: mod_base = OTHER; note = 2'-O-(2-methoxyethyl) ribonucleotide
  modified_base 1..2: mod_base = OTHER; note = 5-methyl cytidine
  modified_base 7: mod_base = OTHER; note = 5-methyl cytidine
  modified_base 15: mod_base = OTHER; note = 5-methyl cytidine
  modified_base 19..20: mod_base = OTHER; note = 5-methyl cytidine
cctgaactgtatggctgacc

SEQ ID NO: 573 - RNA, 20 nt, synthetic construct
  source 1..20: mol_type = other RNA
  modified_base 1..3: mod_base = OTHER; note = Phosphorothioate linkage
  modified_base 17..20: mod_base = OTHER; note = Phosphorothioate linkage
  modified_base 1..20: mod_base = OTHER; note = 2'-O-(2-methoxyethyl) ribonucleotide
  modified_base 4: mod_base = OTHER; note = 5-methyl cytidine
  modified_base 6..8: mod_base = OTHER; note = 5-methyl cytidine
  modified_base 12: mod_base = OTHER; note = 5-methyl cytidine
gttctccctagctgtgtagt

SEQ ID NO: 574 - RNA, 20 nt, synthetic construct
  source 1..20: mol_type = other RNA
  modified_base 1..5: mod_base = OTHER; note = Phosphorothioate linkage
  modified_base 17..20: mod_base = OTHER; note = Phosphorothioate linkage
  modified_base 1..20: mod_base = OTHER; note = 2'-O-(2-methoxyethyl) ribonucleotide
  modified_base 4: mod_base = OTHER; note = 5-methyl cytidine
  modified_base 6..8: mod_base = OTHER; note = 5-methyl cytidine
  modified_base 12: mod_base = OTHER; note = 5-methyl cytidine
gttctccctagctgtgtagt

SEQ ID NO: 575 - RNA, 20 nt, synthetic construct
  source 1..20: mol_type = other RNA
  modified_base 1..7: mod_base = OTHER; note = Phosphorothioate linkage
  modified_base 17..20: mod_base = OTHER; note = Phosphorothioate linkage
  modified_base 1..20: mod_base = OTHER; note = 2'-O-(2-methoxyethyl) ribonucleotide
  modified_base 4: mod_base = OTHER; note = 5-methyl cytidine
  modified_base 6..8: mod_base = OTHER; note = 5-methyl cytidine
  modified_base 12: mod_base = OTHER; note = 5-methyl cytidine
gttctccctagctgtgtagt

SEQ ID NO: 576 - RNA, 20 nt, synthetic construct
  source 1..20: mol_type = other RNA
  modified_base 1..9: mod_base = OTHER; note = Phosphorothioate linkage
  modified_base 17..20: mod_base = OTHER; note = Phosphorothioate linkage
  modified_base 1..20: mod_base = OTHER; note = 2'-O-(2-methoxyethyl) ribonucleotide
  modified_base 4: mod_base = OTHER; note = 5-methyl cytidine
  modified_base 6..8: mod_base = OTHER; note = 5-methyl cytidine
  modified_base 15: mod_base = OTHER; note = 5-methyl cytidine
  modified_base 19..20: mod_base = OTHER; note = 5-methyl cytidine
gttctccctagctgtgtagt

SEQ ID NO: 577 - RNA, 20 nt, synthetic construct
  source 1..20: mol_type = other RNA
  modified_base 1..11: mod_base = OTHER; note = Phosphorothioate linkage
  modified_base 17..20: mod_base = OTHER; note = Phosphorothioate linkage
  modified_base 1..20: mod_base = OTHER; note = 2'-O-(2-methoxyethyl) ribonucleotide
  modified_base 4: mod_base = OTHER; note = 5-methyl cytidine
  modified_base 6..8: mod_base = OTHER; note = 5-methyl cytidine
  modified_base 12: mod_base = OTHER; note = 5-methyl cytidine
gttctccctagctgtgtagt

SEQ ID NO: 578 - RNA, 20 nt, synthetic construct
  source 1..20: mol_type = other RNA
  modified_base 1..13: mod_base = OTHER; note = Phosphorothioate linkage
  modified_base 17..20: mod_base = OTHER; note = Phosphorothioate linkage
  modified_base 1..20: mod_base = OTHER; note = 2'-O-(2-methoxyethyl) ribonucleotide
  modified_base 4: mod_base = OTHER; note = 5-methyl cytidine
  modified_base 6..8: mod_base = OTHER; note = 5-methyl cytidine
  modified_base 12: mod_base = OTHER; note = 5-methyl cytidine
gttctccctagctgtgtagt

SEQ ID NO: 579 - RNA, 20 nt, synthetic construct
  source 1..20: mol_type = other RNA
  modified_base 1..3: mod_base = OTHER; note = Phosphorothioate linkage
  modified_base 16..20: mod_base = OTHER; note = Phosphorothioate linkage
  modified_base 16..20: mod_base = OTHER; note = 2'-O-(2-methoxyethyl) ribonucleotide
  modified_base 4: mod_base = OTHER; note = 5-methyl cytidine
  modified_base 6..8: mod_base = OTHER; note = 5-methyl cytidine
  modified_base 12: mod_base = OTHER; note = 5-methyl cytidine
gttctccctagctgtgtagt

SEQ ID NO: 580 - RNA, 20 nt, synthetic construct
  source 1..20: mol_type = other RNA
  modified_base 1..3: mod_base = OTHER; note = Phosphorothioate linkage
  modified_base 14..20: mod_base = OTHER; note = Phosphorothioate linkage
  modified_base 1..20: mod_base = OTHER; note = 2'-O-(2-methoxyethyl) ribonucleotide
  modified_base 4: mod_base = OTHER; note = 5-methyl cytidine
  modified_base 6..8: mod_base = OTHER; note = 5-methyl cytidine
  modified_base 12: mod_base = OTHER; note = 5-methyl cytidine
gttctccctagctgtgtagt

SEQ ID NO: 581 - RNA, 20 nt, synthetic construct
  source 1..20: mol_type = other RNA
  modified_base 1..3: mod_base = OTHER; note = Phosphorothioate linkage
  modified_base 12..20: mod_base = OTHER; note = Phosphorothioate linkage
  modified_base 1..20: mod_base = OTHER; note = 2'-O-(2-methoxyethyl) ribonucleotide
  modified_base 4: mod_base = OTHER; note = 5-methyl cytidine
  modified_base 6..8: mod_base = OTHER; note = 5-methyl cytidine
  modified_base 12: mod_base = OTHER; note = 5-methyl cytidine
gttctccctagctgtgtagt

SEQ ID NO: 582 - RNA, 20 nt, synthetic construct
  source 1..20: mol_type = other RNA
  modified_base 1..3: mod_base = OTHER; note = Phosphorothioate linkage
  modified_base 10..20: mod_base = OTHER; note = Phosphorothioate linkage
  modified_base 1..20: mod_base = OTHER; note = 2'-O-(2-methoxyethyl) ribonucleotide
  modified_base 4: mod_base = OTHER; note = 5-methyl cytidine
  modified_base 6..8: mod_base = OTHER; note = 5-methyl cytidine
  modified_base 12: mod_base = OTHER; note = 5-methyl cytidine
gttctccctagctgtgtagt

SEQ ID NO: 583 - RNA, 20 nt, synthetic construct
  source 1..20: mol_type = other RNA
  modified_base 1..3: mod_base = OTHER; note = Phosphorothioate linkage
  modified_base 8..20: mod_base = OTHER; note = Phosphorothioate linkage
  modified_base 1..20: mod_base = OTHER; note = 2'-O-(2-methoxyethyl) ribonucleotide
  modified_base 4: mod_base = OTHER; note = 5-methyl cytidine
  modified_base 6..8: mod_base = OTHER; note = 5-methyl cytidine
  modified_base 12: mod_base = OTHER; note = 5-methyl cytidine
gttctccctagctgtgtagt

SEQ ID NO: 584 - RNA, 20 nt, synthetic construct
  source 1..20: mol_type = other RNA
  modified_base 1..20: mod_base = OTHER; note = Phosphorothioate linkage
  modified_base 1..2: mod_base = OTHER; note = locked nucleic acid
  modified_base 3: mod_base = OTHER; note = 2'-O-(2-methoxyethyl) ribonucleotide
  modified_base 4..5: mod_base = OTHER; note = locked nucleic acid
  modified_base 6: mod_base = OTHER; note = 2'-O-(2-methoxyethyl) ribonucleotide
  modified_base 7: mod_base = OTHER; note = locked nucleic acid
  modified_base 8: mod_base = OTHER; note = 2'-O-(2-methoxyethyl) ribonucleotide
  modified_base 9: mod_base = OTHER; note = locked nucleic acid
  modified_base 10: mod_base = OTHER; note = 2'-O-(2-methoxyethyl) ribonucleotide
  modified_base 11: mod_base = OTHER; note = locked nucleic acid
  modified_base 12: mod_base = OTHER; note = 2'-O-(2-methoxyethyl) ribonucleotide
  modified_base 13: mod_base = OTHER; note = locked nucleic acid
  modified_base 14: mod_base = OTHER; note = 2'-O-(2-methoxyethyl) ribonucleotide
  modified_base 15: mod_base = OTHER; note = locked nucleic acid
  modified_base 16: mod_base = OTHER; note = 2'-O-(2-methoxyethyl) ribonucleotide
  modified_base 17: mod_base = OTHER; note = locked nucleic acid
  modified_base 18: mod_base = OTHER; note = 2'-O-(2-methoxyethyl) ribonucleotide
  modified_base 19: mod_base = OTHER; note = locked nucleic acid
  modified_base 20: mod_base = OTHER; note = 2'-O-(2-methoxyethyl) ribonucleotide
  modified_base 4: mod_base = OTHER; note = 5-methyl cytidine
  modified_base 6..8: mod_base = OTHER; note = 5-methyl cytidine
  modified_base 12: mod_base = OTHER; note = 5-methyl cytidine
gttctccctagctgtgtagt

SEQ ID NO: 585 - RNA, 20 nt, synthetic construct
  source 1..20: mol_type = other RNA
  modified_base 1..20: mod_base = OTHER; note = Phosphorothioate linkage
  modified_base 1..2: mod_base = OTHER; note = locked nucleic acid
  modified_base 3: mod_base = OTHER; note = 2'-O-(2-methoxyethyl) ribonucleotide
  modified_base 4: mod_base = OTHER; note = locked nucleic acid
  modified_base 5: mod_base = OTHER; note = 2'-O-(2-methoxyethyl) ribonucleotide
  modified_base 6: mod_base = OTHER; note = locked nucleic acid
  modified_base 7: mod_base = OTHER; note = 2'-O-(2-methoxyethyl) ribonucleotide
  modified_base 8: mod_base = OTHER; note = locked nucleic acid
  modified_base 9: mod_base = OTHER; note = 2'-O-(2-methoxyethyl) ribonucleotide
  modified_base 10: mod_base = OTHER; note = locked nucleic acid
  modified_base 11: mod_base = OTHER; note = 2'-O-(2-methoxyethyl) ribonucleotide
  modified_base 12: mod_base = OTHER; note = locked nucleic acid
  modified_base 13: mod_base = OTHER; note = 2'-O-(2-methoxyethyl) ribonucleotide
  modified_base 14: mod_base = OTHER; note = locked nucleic acid
  modified_base 15: mod_base = OTHER; note = 2'-O-(2-methoxyethyl) ribonucleotide
  modified_base 16..17: mod_base = OTHER; note = locked nucleic acid
  modified_base 18: mod_base = OTHER; note = 2'-O-(2-methoxyethyl) ribonucleotide
  modified_base 19: mod_base = OTHER; note = locked nucleic acid
  modified_base 20: mod_base = OTHER; note = 2'-O-(2-methoxyethyl) ribonucleotide
  modified_base 4: mod_base = OTHER; note = 5-methyl cytidine
  modified_base 6..8: mod_base = OTHER; note = 5-methyl cytidine
  modified_base 12: mod_base = OTHER; note = 5-methyl cytidine
gttctccctagctgtgtagt

SEQ ID NO: 586 - RNA, 20 nt, synthetic construct
  source 1..20: mol_type = other RNA
  modified_base 1..3: mod_base = OTHER; note = Phosphorothioate linkage
  modified_base 17..20: mod_base = OTHER; note = Phosphorothioate linkage
  modified_base 1..20: mod_base = OTHER; note = 2'-O-(2-methoxyethyl) ribonucleotide
  modified_base 1..2: mod_base = OTHER; note = 5-methyl cytidine
  modified_base 7: mod_base = OTHER; note = 5-methyl cytidine
  modified_base 15: mod_base = OTHER; note = 5-methyl cytidine
  modified_base 19..20: mod_base = OTHER; note = 5-methyl cytidine
cctgaactgtatggctgacc

SEQ ID NO: 587 - RNA, 20 nt, synthetic construct
  source 1..20: mol_type = other RNA
  modified_base 1..5: mod_base = OTHER; note = Phosphorothioate linkage
  modified_base 17..20: mod_base = OTHER; note = Phosphorothioate linkage
  modified_base 1..20: mod_base = OTHER; note = 2'-O-(2-methoxyethyl) ribonucleotide
  modified_base 1..2: mod_base = OTHER; note = 5-methyl cytidine
  modified_base 7: mod_base = OTHER; note = 5-methyl cytidine
  modified_base 15: mod_base = OTHER; note = 5-methyl cytidine
  modified_base 19..20: mod_base = OTHER; note = 5-methyl cytidine
cctgaactgtatggctgacc

SEQ ID NO: 588 - RNA, 20 nt, synthetic construct
  source 1..20: mol_type = other RNA
  modified_base 1..7: mod_base = OTHER; note = Phosphorothioate linkage
  modified_base 17..20: mod_base = OTHER; note = Phosphorothioate linkage
  modified_base 1..20: mod_base = OTHER; note = 2'-O-(2-methoxyethyl) ribonucleotide
  modified_base 1..2: mod_base = OTHER; note = 5-methyl cytidine
  modified_base 7: mod_base = OTHER; note = 5-methyl cytidine
  modified_base 15: mod_base = OTHER; note = 5-methyl cytidine
  modified_base 19..20: mod_base = OTHER; note = 5-methyl cytidine
cctgaactgtatggctgacc

SEQ ID NO: 589 - RNA, 20 nt, synthetic construct
  source 1..20: mol_type = other RNA
  modified_base 1..9: mod_base = OTHER; note = Phosphorothioate linkage
  modified_base 17..20: mod_base = OTHER; note = Phosphorothioate linkage
  modified_base 1..20: mod_base = OTHER; note = 2'-O-(2-methoxyethyl) ribonucleotide
  modified_base 1..2: mod_base = OTHER; note = 5-methyl cytidine
  modified_base 7: mod_base = OTHER; note = 5-methyl cytidine
  modified_base 15: mod_base = OTHER; note = 5-methyl cytidine
  modified_base 19..20: mod_base = OTHER; note = 5-methyl cytidine
cctgaactgtatggctgacc

SEQ ID NO: 590 - RNA, 20 nt, synthetic construct
  source 1..20: mol_type = other RNA
  modified_base 1..11: mod_base = OTHER; note = Phosphorothioate linkage
  modified_base 17..20: mod_base = OTHER; note = Phosphorothioate linkage
  modified_base 1..20: mod_base = OTHER; note = 2'-O-(2-methoxyethyl) ribonucleotide
  modified_base 1..2: mod_base = OTHER; note = 5-methyl cytidine
  modified_base 7: mod_base = OTHER; note = 5-methyl cytidine
  modified_base 15: mod_base = OTHER; note = 5-methyl cytidine
  modified_base 19..20: mod_base = OTHER; note = 5-methyl cytidine
cctgaactgtatggctgacc

SEQ ID NO: 591 - RNA, 20 nt, synthetic construct
  source 1..20: mol_type = other RNA
  modified_base 1..13: mod_base = OTHER; note = Phosphorothioate linkage
  modified_base 17..20: mod_base = OTHER; note = 2'-O-(2-methoxyethyl) ribonucleotide
  modified_base 1..2: mod_base = OTHER; note = 5-methyl cytidine
  modified_base 7: mod_base = OTHER; note = 5-methyl cytidine
  modified_base 15: mod_base = OTHER; note = 5-methyl cytidine
  modified_base 19..20: mod_base = OTHER; note = 5-methyl cytidine
cctgaactgtatggctgacc

SEQ ID NO: 592 - RNA, 20 nt, synthetic construct
  source 1..20: mol_type = other RNA
  modified_base 1..3: mod_base = OTHER; note = Phosphorothioate linkage
  modified_base 16..20: mod_base = OTHER; note = Phosphorothioate linkage
  modified_base 1..2: mod_base = OTHER; note = 2'-O-(2-methoxyethyl) ribonucleotide
  modified_base 7: mod_base = OTHER; note = 5-methyl cytidine
  modified_base 15: mod_base = OTHER; note = 5-methyl cytidine
  modified_base 19..20: mod_base = OTHER; note = 5-methyl cytidine
cctgaactgtatggctgacc

SEQ ID NO: 593 - RNA, 20 nt, synthetic construct
  source 1..20: mol_type = other RNA
  modified_base 1..3: mod_base = OTHER; note = Phosphorothioate linkage
  modified_base 14..20: mod_base = OTHER; note = Phosphorothioate linkage
  modified_base 1..20: mod_base = OTHER; note = 2'-O-(2-methoxyethyl) ribonucleotide
  modified_base 1..2: mod_base = OTHER; note = 5-methyl cytidine
  modified_base 7: mod_base = OTHER; note = 5-methyl cytidine
  modified_base 15: mod_base = OTHER; note = 5-methyl cytidine
  modified_base 19..20: mod_base = OTHER; note = 5-methyl cytidine
cctgaactgtatggctgacc

SEQ ID NO: 594 - RNA, 20 nt, synthetic construct
  source 1..20: mol_type = other RNA
  modified_base 1..3: mod_base = OTHER; note = Phosphorothioate linkage
  modified_base 12..20: mod_base = OTHER; note = 2'-O-(2-methoxyethyl) ribonucleotide
  modified_base 1..2: mod_base = OTHER; note = 5-methyl cytidine
  modified_base 7: mod_base = OTHER; note = 5-methyl cytidine
  modified_base 15: mod_base = OTHER; note = 5-methyl cytidine
  modified_base 19..20: mod_base = OTHER; note = 5-methyl cytidine
cctgaactgtatggctgacc

SEQ ID NO: 595 - RNA, 20 nt, synthetic construct
  source 1..20: mol_type = other RNA
  modified_base 1..3: mod_base = OTHER; note = Phosphorothioate linkage
  modified_base 10..20: mod_base = OTHER; note = Phosphorothioate linkage
  modified_base 1..20: mod_base = OTHER; note = 2'-O-(2-methoxyethyl) ribonucleotide
  modified_base 1..2: mod_base = OTHER; note = 5-methyl cytidine
  modified_base 7: mod_base = OTHER; note = 5-methyl cytidine
  modified_base 15: mod_base = OTHER; note = 5-methyl cytidine
  modified_base 19..20: mod_base = OTHER; note = 5-methyl cytidine
cctgaactgtatggctgacc

SEQ ID NO: 596 - RNA, 20 nt, synthetic construct
  source 1..20: mol_type = other RNA
  modified_base 1..3: mod_base = OTHER; note = Phosphorothioate linkage
  modified_base 8..20: mod_base = OTHER; note = Phosphorothioate linkage
  modified_base 1..20: mod_base = OTHER; note = 2'-O-(2-methoxyethyl) ribonucleotide
  modified_base 1..2: mod_base = OTHER; note = 5-methyl cytidine
  modified_base 7: mod_base = OTHER; note = 5-methyl cytidine
  modified_base 15: mod_base = OTHER; note = 5-methyl cytidine
  modified_base 19..20: mod_base = OTHER; note = 5-methyl cytidine
cctgaactgtatggctgacc

SEQ ID NO: 597 - RNA, 20 nt, synthetic construct
  source 1..20: mol_type = other RNA
  modified_base 1..20: mod_base = OTHER; note = Phosphorothioate linkage
  modified_base 1..2: mod_base = OTHER; note = locked nucleic acid
  modified_base 3: mod_base = OTHER; note = 2'-O-(2-methoxyethyl) ribonucleotide
  modified_base 4..5: mod_base = OTHER; note = locked nucleic acid
  modified_base 6: mod_base = OTHER; note = 2'-O-(2-methoxyethyl) ribonucleotide
  modified_base 7: mod_base = OTHER; note = locked nucleic acid
  modified_base 8: mod_base = OTHER; note = 2'-O-(2-methoxyethyl) ribonucleotide
  modified_base 9: mod_base = OTHER; note = locked nucleic acid
  modified_base 10: mod_base = OTHER; note = 2'-O-(2-methoxyethyl) ribonucleotide
  modified_base 11: mod_base = OTHER; note = locked nucleic acid
  modified_base 12: mod_base = OTHER; note = 2'-O-(2-methoxyethyl) ribonucleotide
  modified_base 13: mod_base = OTHER; note = locked nucleic acid
  modified_base 14: mod_base = OTHER; note = 2'-O-(2-methoxyethyl) ribonucleotide
  modified_base 15: mod_base = OTHER; note = locked nucleic acid
  modified_base 16: mod_base = OTHER; note = 2'-O-(2-methoxyethyl) ribonucleotide
  modified_base 17: mod_base = OTHER; note = locked nucleic acid
  modified_base 18: mod_base = OTHER; note = 2'-O-(2-methoxyethyl) ribonucleotide
  modified_base 19..20: mod_base = OTHER; note = locked nucleic acid
  modified_base 1..2: mod_base = OTHER; note = 5-methyl cytidine
  modified_base 7: mod_base = OTHER; note = 5-methyl cytidine
  modified_base 15: mod_base = OTHER; note = 5-methyl cytidine
  modified_base 19..20: mod_base = OTHER; note = 5-methyl cytidine
cctgaactgtatggctgacc

SEQ ID NO: 598 - RNA, 20 nt, synthetic construct
  source 1..20: mol_type = other RNA
  modified_base 1..20: mod_base = OTHER; note = Phosphorothioate linkage
  modified_base 1..2: mod_base = OTHER; note = locked nucleic acid
  modified_base 3: mod_base = OTHER; note = 2'-O-(2-methoxyethyl) ribonucleotide
  modified_base 4: mod_base = OTHER; note = locked nucleic acid
  modified_base 5: mod_base = OTHER; note = 2'-O-(2-methoxyethyl) ribonucleotide
  modified_base 6: mod_base = OTHER; note = locked nucleic acid
  modified_base 7: mod_base = OTHER; note = 2'-O-(2-methoxyethyl) ribonucleotide
  modified_base 8: mod_base = OTHER; note = locked nucleic acid
  modified_base 9: mod_base = OTHER; note = 2'-O-(2-methoxyethyl) ribonucleotide
  modified_base 10: mod_base = OTHER; note = locked nucleic acid
  modified_base 11: mod_base = OTHER; note = 2'-O-(2-methoxyethyl) ribonucleotide
  modified_base 12: mod_base = OTHER; note = locked nucleic acid
  modified_base 13: mod_base = OTHER; note = 2'-O-(2-methoxyethyl) ribonucleotide
  modified_base 14: mod_base = OTHER; note = locked nucleic acid
  modified_base 15: mod_base = OTHER; note = 2'-O-(2-methoxyethyl) ribonucleotide
  modified_base 16..17: mod_base = OTHER; note = locked nucleic acid
  modified_base 18: mod_base = OTHER; note = 2'-O-(2-methoxyethyl) ribonucleotide
  modified_base 19..20: mod_base = OTHER; note = locked nucleic acid
  modified_base 1..2: mod_base = OTHER; note = 5-methyl cytidine
  modified_base 7: mod_base = OTHER; note = 5-methyl cytidine
  modified_base 15: mod_base = OTHER; note = 5-methyl cytidine
  modified_base 19..20: mod_base = OTHER; note = 5-methyl cytidine
cctgaactgtatggctgacc

SEQ ID NO: 599 - RNA, 20 nt, synthetic construct
  source 1..20: mol_type = other RNA
  modified_base 1..20: mod_base = OTHER; note = Phosphorothioate linkage
  modified_base 1..20: mod_base = OTHER; note = 2'-O-(2-methoxyethyl) ribonucleotide
  modified_base 10: mod_base = OTHER; note = 5-methyl cytidine
tgggatgttctttgaattag

SEQ ID NO: 600 - RNA, 20 nt, synthetic construct
  source 1..20: mol_type = other RNA
  modified_base 1..20: mod_base = OTHER; note = Phosphorothioate linkage
  modified_base 1..20: mod_base = OTHER; note = 2'-O-(2-methoxyethyl) ribonucleotide
  modified_base 2: mod_base = OTHER; note = 5-methyl cytidine
  modified_base 12: mod_base = OTHER; note = 5-methyl cytidine
tctgggatgttctttgaatt

SEQ ID NO: 601 - RNA, 20 nt, synthetic construct
  source 1..20: mol_type = other RNA
  modified_base 1..20: mod_base = OTHER; note = Phosphorothioate linkage
  modified_base 1..20: mod_base = OTHER; note = 2'-O-(2-methoxyethyl) ribonucleotide
  modified_base 1..2: mod_base = OTHER; note = 5-methyl cytidine
  modified_base 4: mod_base = OTHER; note = 5-methyl cytidine
  modified_base 14: mod_base = OTHER; note = 5-methyl cytidine
cctgaactgtatggctgacc

SEQ ID NO: 602 - RNA, 20 nt, synthetic construct
  source 1..20: mol_type = other RNA
  modified_base 1..20: mod_base = OTHER; note = Phosphorothioate linkage
  modified_base 1..20: mod_base = OTHER; note = 2'-O-(2-methoxyethyl) ribonucleotide
  modified_base 3..4: mod_base = OTHER; note = 5-methyl cytidine
  modified_base 6: mod_base = OTHER; note = 5-methyl cytidine
  modified_base 16: mod_base = OTHER; note = 5-methyl cytidine
ggcctctgggatgttctttg

SEQ ID NO: 603 - RNA, 20 nt, synthetic construct
  source 1..20: mol_type = other RNA
  modified_base 1..20: mod_base = OTHER; note = Phosphorothioate linkage
  modified_base 1..20: mod_base = OTHER; note = 2'-O-(2-methoxyethyl) ribonucleotide
  modified_base 5..6: mod_base = OTHER; note = 5-methyl cytidine
  modified_base 17: mod_base = OTHER; note = 5-methyl cytidine
atggcctctgggatgttctt

SEQ ID NO: 604 - RNA, 20 nt, synthetic construct
  source 1..20: mol_type = other RNA
  modified_base 1..20: mod_base = OTHER; note = Phosphorothioate linkage
  modified_base 1..20: mod_base = OTHER; note = 2'-O-(2-methoxyethyl) ribonucleotide
  modified_base 9..10: mod_base = OTHER; note = 5-methyl cytidine
  modified_base 12: mod_base = OTHER; note = 5-methyl cytidine
ggagatggcctctgggatgt

SEQ ID NO: 605 - RNA, 20 nt, synthetic construct
  source 1..20: mol_type = other RNA
  modified_base 1..20: mod_base = OTHER; note = Phosphorothioate linkage
  modified_base 1..20: mod_base = OTHER; note = 2'-O-(2-methoxyethyl) ribonucleotide
  modified_base 12..13: mod_base = OTHER; note = 5-methyl cytidine
  modified_base 15: mod_base = OTHER; note = 5-methyl cytidine
ttaggagatggcctctggga

SEQ ID NO: 606 - RNA, 20 nt, synthetic construct
  source 1..20: mol_type = other RNA
  modified_base 1..20: mod_base = OTHER; note = Phosphorothioate linkage
  modified_base 1..5: mod_base = OTHER; note = 2'-O-(2-methoxyethyl) ribonucleotide
  misc_feature 6..15: note = DNA
  modified_base 16..20: mod_base = OTHER; note = 2'-O-(2-methoxyethyl) ribonucleotide
  modified_base 7..8: mod_base = OTHER; note = 5-methyl cytidine
  modified_base 10: mod_base = OTHER; note = 5-methyl cytidine
  modified_base 20: mod_base = OTHER; note = 5-methyl cytidine
agatggcctctgggatgttc

SEQ ID NO: 607 - RNA, 20 nt, synthetic construct
  source 1..20: mol_type = other RNA
  modified_base 1..20: mod_base = OTHER; note = Phosphorothioate linkage
  modified_base 1..5: mod_base = OTHER; note = 2'-O-(2-methoxyethyl) ribonucleotide
  misc_feature 6..8: note = DNA
  modified_base 9: mod_base = OTHER; note = 2'-O-(2-methoxyethyl) ribonucleotide
  misc_feature 10..11: note = DNA
  modified_base 12: mod_base = OTHER; note = 2'-O-(2-methoxyethyl) ribonucleotide
  misc_feature 13..15: note = DNA
  modified_base 16..20: mod_base = OTHER; note = 2'-O-(2-methoxyethyl) ribonucleotide
  modified_base 7..8: mod_base = OTHER; note = 5-methyl cytidine
  modified_base 10: mod_base = OTHER; note = 5-methyl cytidine
  modified_base 20: mod_base = OTHER; note = 5-methyl cytidine
agatggcctctgggatgttc

SEQ ID NO: 608 - RNA, 20 nt, synthetic construct
  source 1..20: mol_type = other RNA
  modified_base 1..20: mod_base = OTHER; note = Phosphorothioate linkage
  modified_base 1..5: mod_base = OTHER; note = 2'-O-(2-methoxyethyl) ribonucleotide
  modified_base 6: mod_base = OTHER; note = locked nucleic acid
  misc_feature 7..8: note = DNA
  modified_base 9: mod_base = OTHER; note = locked nucleic acid
  misc_feature 10..11: note = DNA
  modified_base 12: mod_base = OTHER; note = locked nucleic acid
  misc_feature 13..14: note = DNA
  modified_base 15: mod_base = OTHER; note = locked nucleic acid
  modified_base 16..20: mod_base = OTHER; note = 2'-O-(2-methoxyethyl) ribonucleotide
  modified_base 7..8: mod_base = OTHER; note = 5-methyl cytidine
  modified_base 10: mod_base = OTHER; note = 5-methyl cytidine
  modified_base 20: mod_base = OTHER; note = 5-methyl cytidine
agatggcctctgggatgttc

SEQ ID NO: 609 - RNA, 20 nt, synthetic construct
  source 1..20: mol_type = other RNA
  modified_base 1..20: mod_base = OTHER; note = Phosphorothioate linkage
  modified_base 1..3: mod_base = OTHER; note = 2'-O-(2-methoxyethyl) ribonucleotide
  modified_base 4: mod_base = OTHER; note = locked nucleic acid
  modified_base 5: mod_base = OTHER; note = 2'-O-(2-methoxyethyl) ribonucleotide
  misc_feature 6..7: note = DNA
  modified_base 8: mod_base = OTHER; note = locked nucleic acid
  misc_feature 9..11: note = DNA
  modified_base 12: mod_base = OTHER; note = locked nucleic acid
  misc_feature 13..15: note = DNA
  modified_base 16: mod_base = OTHER; note = locked nucleic acid
  modified_base 17..20: mod_base = OTHER; note = 2'-O-(2-methoxyethyl) ribonucleotide
  modified_base 7..8: mod_base = OTHER; note = 5-methyl cytidine
  modified_base 10: mod_base = OTHER; note = 5-methyl cytidine
  modified_base 20: mod_base = OTHER; note = 5-methyl cytidine
agatggcctctgggatgttc

SEQ ID NO: 610 - RNA, 20 nt, synthetic construct
  source 1..20: mol_type = other RNA
  modified_base 1..20: mod_base = OTHER; note = Phosphorothioate linkage
  modified_base 1..4: mod_base = OTHER; note = 2'-O-(2-methoxyethyl) ribonucleotide
  modified_base 5: mod_base = OTHER; note = locked nucleic acid
  misc_feature 6..8: note = DNA
  modified_base 9: mod_base = OTHER; note = 2'-O-(2-methoxyethyl) ribonucleotide
  misc_feature 10..12: note = DNA
  modified_base 13: mod_base = OTHER; note = 2'-O-(2-methoxyethyl) ribonucleotide
  misc_feature 14..15: note = DNA
  modified_base 16: mod_base = OTHER; note = 2'-O-(2-methoxyethyl) ribonucleotide
  modified_base 17: mod_base = OTHER; note = locked nucleic acid
  modified_base 18..20: mod_base = OTHER; note = 2'-O-(2-methoxyethyl) ribonucleotide
  modified_base 7..8: mod_base = OTHER; note = 5-methyl cytidine
  modified_base 10: mod_base = OTHER; note = 5-methyl cytidine
  modified_base 20: mod_base = OTHER; note = 5-methyl cytidine
agatggcctctgggatgttc

SEQ ID NO: 611 - RNA, 20 nt, synthetic construct
  source 1..20: mol_type = other RNA
  modified_base 1..20: mod_base = OTHER; note = Phosphorothioate linkage
  modified_base 1..5: mod_base = OTHER; note = 2'-O-(2-methoxyethyl) ribonucleotide
  modified_base 6: mod_base = OTHER; note = locked nucleic acid
  modified_base 7..8: mod_base = OTHER; note = 2'-O-(2-methoxyethyl) ribonucleotide
  modified_base 9: mod_base = OTHER; note = locked nucleic acid
  modified_base 10..11: mod_base = OTHER; note = 2'-O-(2-methoxyethyl) ribonucleotide
  modified_base 12: mod_base = OTHER; note = locked nucleic acid
  modified_base 13..14: mod_base = OTHER; note = 2'-O-(2-methoxyethyl) ribonucleotide
  modified_base 15: mod_base = OTHER; note = locked nucleic acid
  modified_base 16..20: mod_base = OTHER; note = 2'-O-(2-methoxyethyl) ribonucleotide
  modified_base 7..8: mod_base = OTHER; note = 5-methyl cytidine
  modified_base 10: mod_base = OTHER; note = 5-methyl cytidine
  modified_base 20: mod_base = OTHER; note = 5-methyl cytidine
agatggcctctgggatgttc

SEQ ID NO: 612 - RNA, 20 nt, synthetic construct
  source 1..20: mol_type = other RNA
  modified_base 1..20: mod_base = OTHER; note = Phosphorothioate linkage
  modified_base 1..3: mod_base = OTHER; note = 2'-O-(2-methoxyethyl) ribonucleotide
  modified_base 4: mod_base = OTHER; note = locked nucleic acid
  modified_base 5: mod_base = OTHER; note = 2'-O-(2-methoxyethyl) ribonucleotide
  modified_base 6: mod_base = OTHER; note = locked nucleic acid
  modified_base 7: mod_base = OTHER; note = 2'-O-(2-methoxyethyl) ribonucleotide
  modified_base 8: mod_base = OTHER; note = locked nucleic acid
  modified_base 9: mod_base = OTHER; note = 2'-O-(2-methoxyethyl) ribonucleotide
  modified_base 10: mod_base = OTHER; note = locked nucleic acid
  modified_base 11: mod_base = OTHER; note = 2'-O-(2-methoxyethyl) ribonucleotide
  modified_base 12: mod_base = OTHER; note = locked nucleic acid
  modified_base 13: mod_base = OTHER; note = 2'-O-(2-methoxyethyl) ribonucleotide
  modified_base 14: mod_base = OTHER; note = locked nucleic acid
  modified_base 15: mod_base = OTHER; note = 2'-O-(2-methoxyethyl) ribonucleotide
  modified_base 16: mod_base = OTHER; note = locked nucleic acid
  modified_base 17: mod_base = OTHER; note = 2'-O-(2-methoxyethyl) ribonucleotide
  modified_base 18: mod_base = OTHER; note = locked nucleic acid
  modified_base 19..20: mod_base = OTHER; note = 2'-O-(2-methoxyethyl) ribonucleotide
  modified_base 7..8: mod_base = OTHER; note = 5-methyl cytidine
  modified_base 10: mod_base = OTHER; note = 5-methyl cytidine
  modified_base 20: mod_base = OTHER; note = 5-methyl cytidine
agatggcctctgggatgttc

SEQ ID NO: 613 - RNA, 20 nt, synthetic construct
  source 1..20: mol_type = other RNA
  modified_base 1..20: mod_base = OTHER; note = Phosphorothioate linkage
  modified_base 1..2: mod_base = OTHER; note = 2'-O-(2-methoxyethyl) ribonucleotide
  modified_base 3: mod_base = OTHER; note = locked nucleic acid
  modified_base 4: mod_base = OTHER; note = 2'-O-(2-methoxyethyl) ribonucleotide
  modified_base 5: mod_base = OTHER; note = locked nucleic acid
  modified_base 6: mod_base = OTHER; note = 2'-O-(2-methoxyethyl) ribonucleotide
  modified_base 7: mod_base = OTHER; note = locked nucleic acid
  modified_base 8: mod_base = OTHER; note = 2'-O-(2-methoxyethyl) ribonucleotide
  modified_base 9: mod_base = OTHER; note = locked nucleic acid
  modified_base 10: mod_base = OTHER; note = 2'-O-(2-methoxyethyl) ribonucleotide
  modified_base 11: mod_base = OTHER; note = locked nucleic acid
  modified_base 12: mod_base = OTHER; note = 2'-O-(2-methoxyethyl) ribonucleotide
  modified_base 13: mod_base = OTHER; note = locked nucleic acid
  modified_base 14: mod_base = OTHER; note = 2'-O-(2-methoxyethyl) ribonucleotide
  modified_base 15: mod_base = OTHER; note = locked nucleic acid
  modified_base 16: mod_base = OTHER; note = 2'-O-(2-methoxyethyl) ribonucleotide
  modified_base 17: mod_base = OTHER; note = locked nucleic acid
  modified_base 18..20: mod_base = OTHER; note = 2'-O-(2-methoxyethyl) ribonucleotide
  modified_base 7..8: mod_base = OTHER; note = 5-methyl cytidine
  modified_base 10: mod_base = OTHER; note = 5-methyl cytidine
  modified_base 20: mod_base = OTHER; note = 5-methyl cytidine
agatggcctctgggatgttc

SEQ ID NO: 614 - RNA, 20 nt, synthetic construct
  source 1..20: mol_type = other RNA
  modified_base 1..20: mod_base = OTHER; note = Phosphorothioate linkage
  modified_base 1..2: mod_base = OTHER; note = 2'-O-(2-methoxyethyl) ribonucleotide
  modified_base 3: mod_base = OTHER; note = locked nucleic acid
  modified_base 4..5: mod_base = OTHER; note = 2'-O-(2-methoxyethyl) ribonucleotide
  modified_base 6: mod_base = OTHER; note = locked nucleic acid
  modified_base 7..8: mod_base = OTHER; note = 2'-O-(2-methoxyethyl) ribonucleotide
  modified_base 9: mod_base = OTHER; note = locked nucleic acid
  modified_base 10..11: mod_base = OTHER; note = 2'-O-(2-methoxyethyl) ribonucleotide
  modified_base 12: mod_base = OTHER; note = locked nucleic acid
  modified_base 13..14: mod_base = OTHER; note = 2'-O-(2-methoxyethyl) ribonucleotide
  modified_base 15: mod_base = OTHER; note = locked nucleic acid
  modified_base 16..17: mod_base = OTHER; note = 2'-O-(2-methoxyethyl) ribonucleotide
  modified_base 18: mod_base = OTHER; note = locked nucleic acid
  modified_base 19..20: mod_base = OTHER; note = 2'-O-(2-methoxyethyl) ribonucleotide
  modified_base 7..8: mod_base = OTHER; note = 5-methyl cytidine
  modified_base 10: mod_base = OTHER; note = 5-methyl cytidine
  modified_base 20: mod_base = OTHER; note = 5-methyl cytidine
agatggcctctgggatgttc

SEQ ID NO: 615 - RNA, 20 nt, synthetic construct
  source 1..20: mol_type = other RNA
  modified_base 1..20: mod_base = OTHER; note = Phosphorothioate linkage
  modified_base 1..4: mod_base = OTHER; note = 2'-O-(2-methoxyethyl) ribonucleotide
  modified_base 5: mod_base = OTHER; note = locked nucleic acid
  modified_base 6..8: mod_base = OTHER; note = 2'-O-(2-methoxyethyl) ribonucleotide
  modified_base 9: mod_base = OTHER; note = locked nucleic acid
  modified_base 10..12: mod_base = OTHER; note = 2'-O-(2-methoxyethyl) ribonucleotide
  modified_base 13: mod_base = OTHER; note = locked nucleic acid
  modified_base 14..16: mod_base = OTHER; note = 2'-O-(2-methoxyethyl) ribonucleotide
  modified_base 17: mod_base = OTHER; note = locked nucleic acid
  modified_base 18..20: mod_base = OTHER; note = 2'-O-(2-methoxyethyl) ribonucleotide
  modified_base 7..8: mod_base = OTHER; note = 5-methyl cytidine
  modified_base 10: mod_base = OTHER; note = 5-methyl cytidine
  modified_base 20: mod_base = OTHER; note = 5-methyl cytidine
agatggcctctgggatgttc

SEQ ID NO: 616 - RNA, 20 nt, synthetic construct
  source 1..20: mol_type = other RNA
  modified_base 1..20: mod_base = OTHER; note = Phosphorothioate linkage
  modified_base 1..3: mod_base = OTHER; note = 2'-O-(2-methoxyethyl) ribonucleotide
  modified_base 4: mod_base = OTHER; note = locked nucleic acid
  modified_base 5..7: mod_base = OTHER; note = 2'-O-(2-methoxyethyl) ribonucleotide
  modified_base 8: mod_base = OTHER; note = locked nucleic acid
  modified_base 9..11: mod_base = OTHER; note = 2'-O-(2-methoxyethyl) ribonucleotide
  modified_base 12: mod_base = OTHER; note = locked nucleic acid
  modified_base 13..15: mod_base = OTHER; note = 2'-O-(2-methoxyethyl) ribonucleotide
  modified_base 16: mod_base = OTHER; note = locked nucleic acid
  modified_base 17..20: mod_base = OTHER; note = 2'-O-(2-methoxyethyl) ribonucleotide
  modified_base 7..8: mod_base = OTHER; note = 5-methyl cytidine
  modified_base 10: mod_base = OTHER; note = 5-methyl cytidine
  modified_base 20: mod_base = OTHER; note = 5-methyl cytidine
agatggcctctgggatgttc

SEQ ID NO: 617 - RNA, 20 nt, synthetic construct
  source 1..20: mol_type = other RNA
  modified_base 1..20: mod_base = OTHER; note = Phosphorothioate linkage
  modified_base 1..5: mod_base = OTHER; note = 2'-O-(2-methoxyethyl) ribonucleotide
  modified_base 6: mod_base = OTHER; note = locked nucleic acid
  modified_base 7..10: mod_base = OTHER; note = 2'-O-(2-methoxyethyl) ribonucleotide
  modified_base 11: mod_base = OTHER; note = locked nucleic acid
  modified_base 12..15: mod_base = OTHER; note = 2'-O-(2-methoxyethyl) ribonucleotide
  modified_base 16: mod_base = OTHER; note = locked nucleic acid
  modified_base 17..20: mod_base = OTHER; note = 2'-O-(2-methoxyethyl) ribonucleotide
  modified_base 7..8: mod_base = OTHER; note = 5-methyl cytidine
  modified_base 10: mod_base = OTHER; note = 5-methyl cytidine
  modified_base 20: mod_base = OTHER; note = 5-methyl cytidine
agatggcctctgggatgttc

SEQ ID NO: 618 - RNA, 20 nt, synthetic construct
  source 1..20: mol_type = other RNA
  modified_base 1..20: mod_base = OTHER; note = Phosphorothioate linkage
  modified_base 1..4: mod_base = OTHER; note = 2'-O-(2-methoxyethyl) ribonucleotide
  modified_base 5: mod_base = OTHER; note = locked nucleic acid
  modified_base 6..9: mod_base = OTHER; note = 2'-O-(2-methoxyethyl) ribonucleotide
  modified_base 10: mod_base = OTHER; note = locked nucleic acid
  modified_base 11..14: mod_base = OTHER; note = 2'-O-(2-methoxyethyl) ribonucleotide
  modified_base 15: mod_base = OTHER; note = locked nucleic acid
  modified_base 16..20: mod_base = OTHER; note = 2'-O-(2-methoxyethyl) ribonucleotide
  modified_base 7..8: mod_base = OTHER; note = 5-methyl cytidine
  modified_base 10: mod_base = OTHER; note = 5-methyl cytidine
  modified_base 20: mod_base = OTHER; note = 5-methyl cytidine
agatggcctctgggatgttc

SEQ ID NO: 619 - RNA, 22 nt, synthetic construct
  source 1..22: mol_type = other RNA
  modified_base 1..22: mod_base = OTHER; note = Phosphorothioate linkage
  modified_base 1..6: mod_base = OTHER; note = 2'-O-(2-methoxyethyl) ribonucleotide
  misc_feature 7..16: note = DNA
  modified_base 17..22: mod_base = OTHER; note = 2'-O-(2-methoxyethyl) ribonucleotide
  modified_base 8..9: mod_base = OTHER; note = 5-methyl cytidine
  modified_base 11: mod_base = OTHER; note = 5-methyl cytidine
  modified_base 21: mod_base = OTHER; note = 5-methyl cytidine
gagatggcctctgggatgttct

SEQ ID NO: 620 - RNA, 22 nt, synthetic construct
  source 1..22: mol_type = other RNA
  modified_base 1..22: mod_base = OTHER; note = Phosphorothioate linkage
  modified_base 1..22: mod_base = OTHER; note = 2'-O-(2-methoxyethyl) ribonucleotide
  modified_base 8..9: mod_base = OTHER; note = 5-methyl cytidine
  modified_base 11: mod_base = OTHER; note = 5-methyl cytidine
  modified_base 21: mod_base = OTHER; note = 5-methyl cytidine
gagatggcctctgggatgttct

SEQ ID NO: 621 - RNA, 22 nt, synthetic construct
  source 1..22: mol_type = other RNA
  modified_base 1..22: mod_base = OTHER; note = Phosphorothioate linkage
  modified_base 1..5: mod_base = OTHER; note = 2'-O-(2-methoxyethyl) ribonucleotide
  misc_feature 6..8: note = DNA
  modified_base 9: mod_base = OTHER; note = 2'-O-(2-methoxyethyl) ribonucleotide
  misc_feature 10..13: note = DNA
  modified_base 14: mod_base = OTHER; note = 2'-O-(2-methoxyethyl) ribonucleotide
  misc_feature 15..17: note = DNA
  modified_base 18..22: mod_base = OTHER; note = 2'-O-(2-methoxyethyl) ribonucleotide
  modified_base 8..9: mod_base = OTHER; note = 5-methyl cytidine
  modified_base 11: mod_base = OTHER; note = 5-methyl cytidine
  modified_base 21: mod_base = OTHER; note = 5-methyl cytidine
gagatggcctctgggatgttct

SEQ ID NO: 622 - RNA, 22 nt, synthetic construct
  source 1..22: mol_type = other RNA
  modified_base 1..22: mod_base = OTHER; note = Phosphorothioate linkage
  modified_base 1..5: mod_base = OTHER; note = 2'-O-(2-methoxyethyl) ribonucleotide
  modified_base 6: mod_base = OTHER; note = locked nucleic acid
  misc_feature 7..8: note = DNA
  modified_base 9: mod_base = OTHER; note = locked nucleic acid
  misc_feature 10..13: note = DNA
  modified_base 14: mod_base = OTHER; note = locked nucleic acid
  misc_feature 15..16: note = DNA
  modified_base 17: mod_base = OTHER; note = locked nucleic acid
  modified_base 18..22: mod_base = OTHER; note = 2'-O-(2-methoxyethyl) ribonucleotide
  modified_base 8..9: mod_base = OTHER; note = 5-methyl cytidine
  modified_base 11: mod_base = OTHER; note = 5-methyl cytidine
  modified_base 21: mod_base = OTHER; note = 5-methyl cytidine
gagatggcctctgggatgttct

SEQ ID NO: 623 - DNA, 24 bp, synthetic construct
  source 1..24: mol_type = other DNA
  modified_base 1..24: mod_base = OTHER; note = Phosphorothioate linkage
  modified_base 1..7: mod_base = OTHER; note = 2'-O-(2-methoxyethyl) ribonucleotide
  misc_feature 8..17: note = DNA
  modified_base 18..24: mod_base = OTHER; note = 2'-O-(2-methoxyethyl) ribonucleotide
  modified_base 8..9: mod_base = OTHER; note = 5-methyl cytidine
  modified_base 11: mod_base = OTHER; note = 5-methyl cytidine
  modified_base 22: mod_base = OTHER; note = 5-methyl cytidine
ggagatggcctctgggatgttctt

SEQ ID NO: 624 - RNA, 24 nt, synthetic construct
  source 1..24: mol_type = other RNA
  modified_base 1..24: mod_base = OTHER; note = Phosphorothioate linkage
  modified_base 1..24: mod_base = OTHER; note = 2'-O-(2-methoxyethyl) ribonucleotide
  modified_base 9..10: mod_base = OTHER; note = 5-methyl cytidine
  modified_base 12: mod_base = OTHER; note = 5-methyl cytidine
  modified_base 22: mod_base = OTHER; note = 5-methyl cytidine
ggagatggcctctgggatgttctt

SEQ ID NO: 625 - RNA, 24 nt, synthetic construct
  source 1..24: mol_type = other RNA
  modified_base 1..24: mod_base = OTHER; note = Phosphorothioate linkage
  modified_base 1..5: mod_base = OTHER; note = 2'-O-(2-methoxyethyl) ribonucleotide
  misc_feature 6..7: note = DNA
  modified_base 8: mod_base = OTHER; note = 2'-O-(2-methoxyethyl) ribonucleotide
  misc_feature 9..10: note = DNA
  modified_base 11: mod_base = OTHER; note = 2'-O-(2-methoxyethyl) ribonucleotide
  misc_feature 12..13: note = DNA
  modified_base 14: mod_base = OTHER; note = 2'-O-(2-methoxyethyl) ribonucleotide
  misc_feature 15..16: note = DNA
  modified_base 17: mod_base = OTHER; note = 2'-O-(2-methoxyethyl) ribonucleotide
  misc_feature 18..19: note = DNA
  modified_base 20..24: mod_base = OTHER; note = 2'-O-(2-methoxyethyl) ribonucleotide
  modified_base 9..10: mod_base = OTHER; note = 5-methyl cytidine
  modified_base 12: mod_base = OTHER; note = 5-methyl cytidine
  modified_base 22: mod_base = OTHER; note = 5-methyl cytidine
ggagatggcctctgggatgttctt

SEQ ID NO: 626 - RNA, 24 nt, synthetic construct
  source 1..24: mol_type = other RNA
  modified_base 1..24: mod_base = OTHER; note = Phosphorothioate linkage
  modified_base 1..5: mod_base = OTHER; note = 2'-O-(2-methoxyethyl) ribonucleotide
  misc_feature 6..7: note = DNA
  modified_base 8: mod_base = OTHER; note = locked nucleic acid
  misc_feature 9..10: note = DNA
  modified_base 11: mod_base = OTHER; note = locked nucleic acid
  misc_feature 12..13: note = DNA
  modified_base 14: mod_base = OTHER; note = locked nucleic acid
  misc_feature 15..16: note = DNA
  modified_base 17: mod_base = OTHER; note = locked nucleic acid
  misc_feature 18..19: note = DNA
  modified_base 20..24: mod_base = OTHER; note = locked nucleic acid
  modified_base 9..10: mod_base = OTHER; note = 5-methyl cytidine
  modified_base 12: mod_base = OTHER; note = 5-methyl cytidine
  modified_base 22: mod_base = OTHER; note = 5-methyl cytidine
ggagatggcctctgggatgttctt

SEQ ID NO: 627 - RNA, 20 nt, synthetic construct
  source 1..20: mol_type = other RNA
  modified_base 1..20: mod_base = OTHER; note = Phosphorothioate linkage
  modified_base 1..20: mod_base = OTHER; note = 2'-O-(2-methoxyethyl) ribonucleotide
  modified_base 1..3: mod_base = OTHER; note = 5-methyl cytidine
  modified_base 6: mod_base = OTHER; note = 5-methyl cytidine
  modified_base 8: mod_base = OTHER; note = 5-methyl cytidine
  modified_base 20: mod_base = OTHER; note = 5-methyl cytidine
cccgacgcaggtaggaggac

SEQ ID NO: 628 - RNA, 20 nt, synthetic construct
  source 1..20: mol_type = other RNA
  modified_base 1..20: mod_base = OTHER; note = Phosphorothioate linkage
  modified_base 1..20: mod_base = OTHER; note = 2'-O-(2-methoxyethyl) ribonucleotide
  modified_base 4..7: mod_base = OTHER; note = 5-methyl cytidine
  modified_base 10: mod_base = OTHER; note = 5-methyl cytidine
  modified_base 12: mod_base = OTHER; note = 5-methyl cytidine
ggaccccgacgcaggtagga

SEQ ID NO: 629 - RNA, 20 nt, synthetic construct
  source 1..20: mol_type = other RNA
  modified_base 1..20: mod_base = OTHER; note = Phosphorothioate linkage
  modified_base 1..20: mod_base = OTHER; note = 2'-O-(2-methoxyethyl) ribonucleotide
  modified_base 1: mod_base = OTHER; note = 5-methyl cytidine
  modified_base 3..5: mod_base = OTHER; note = 5-methyl cytidine
  modified_base 12..14: mod_base = OTHER; note = 5-methyl cytidine
  modified_base 18..20: mod_base = OTHER; note = 5-methyl cytidine
ctcccagggagcccggaccc

SEQ ID NO: 630 - RNA, 20 nt, synthetic construct
  source 1..20: mol_type = other RNA
  modified_base 1..20: mod_base = OTHER; note = Phosphorothioate linkage
  modified_base 1..20: mod_base = OTHER; note = 2'-O-(2-methoxyethyl) ribonucleotide
  modified_base 1: mod_base = OTHER; note = 5-methyl cytidine
  modified_base 3..4: mod_base = OTHER; note = 5-methyl cytidine
  modified_base 10..11: mod_base = OTHER; note = 5-methyl cytidine
  modified_base 13..15: mod_base = OTHER; note = 5-methyl cytidine
cgccagatgcctcccaggga

SEQ ID NO: 631 - RNA, 20 nt, synthetic construct
  source 1..20: mol_type = other RNA
  modified_base 1..20: mod_base = OTHER; note = Phosphorothioate linkage
  modified_base 1..20: mod_base = OTHER; note = 2'-O-(2-methoxyethyl) ribonucleotide
  modified_base 2..3: mod_base = OTHER; note = 5-methyl cytidine
  modified_base 5..6: mod_base = OTHER; note = 5-methyl cytidine
  modified_base 12..13: mod_base = OTHER; note = 5-methyl cytidine
  modified_base 15..17: mod_base = OTHER; note = 5-methyl cytidine
accgccagatgcctcccagg

SEQ ID NO: 632 - RNA, 20 nt, synthetic construct
  source 1..20: mol_type = other RNA
  modified_base 1..20: mod_base = OTHER; note = Phosphorothioate linkage
  modified_base 1..20: mod_base = OTHER; note = 2'-O-(2-methoxyethyl) ribonucleotide
  modified_base 4..5: mod_base = OTHER; note = 5-methyl cytidine
  modified_base 7..8: mod_base = OTHER; note = 5-methyl cytidine
  modified_base 14..15: mod_base = OTHER; note = 5-methyl cytidine
  modified_base 17..19: mod_base = OTHER; note = 5-methyl cytidine
tgaccgccagatgcctccca

SEQ ID NO: 633 - DNA, 20 bp, synthetic construct
  source 1..20: mol_type = other DNA
  modified_base 1..20: mod_base = OTHER; note = Phosphorothioate linkage
  modified_base 1..5: mod_base = OTHER; note = 2'-O-(2-methoxyethyl) ribonucleotide
  misc_feature 6..15: note = DNA
  modified_base 16..20: mod_base = OTHER; note = 2'-O-(2-methoxyethyl) ribonucleotide
  modified_base 4: mod_base = OTHER; note = 5-methyl cytidine
  modified_base 8..9: mod_base = OTHER; note = 5-methyl cytidine
  modified_base 11..12: mod_base = OTHER; note = 5-methyl cytidine
  modified_base 18..19: mod_base = OTHER; note = 5-methyl cytidine
gagctgaccgccagatgcct

SEQ ID NO: 634 - RNA, 20 nt, synthetic construct
  source 1..20: mol_type = other RNA
  modified_base 1..20: mod_base = OTHER; note = Phosphorothioate linkage
  modified_base 1..20: mod_base = OTHER; note = 2'-O-(2-methoxyethyl) ribonucleotide
  modified_base 5: mod_base = OTHER; note = 5-methyl cytidine
  modified_base 9..10: mod_base = OTHER; note = 5-methyl cytidine
  modified_base 12..13: mod_base = OTHER; note = 5-methyl cytidine
  modified_base 19..20: mod_base = OTHER; note = 5-methyl cytidine
ggagctgaccgccagatgcc

SEQ ID NO: 635 - RNA, 20 nt, synthetic construct
  source 1..20: mol_type = other RNA
  modified_base 1..20: mod_base = OTHER; note = Phosphorothioate linkage
  modified_base 1..20: mod_base = OTHER; note = 2'-O-(2-methoxyethyl) ribonucleotide
  modified_base 4..5: mod_base = OTHER; note = 5-methyl cytidine
  modified_base 11: mod_base = OTHER; note = 5-methyl cytidine
  modified_base 15..16: mod_base = OTHER; note = 5-methyl cytidine
  modified_base 18..19: mod_base = OTHER; note = 5-methyl cytidine
agtcctggagctgaccgcca

SEQ ID NO: 636 - RNA, 20 nt, synthetic construct
  source 1..20: mol_type = other RNA
  modified_base 1..20: mod_base = OTHER; note = Phosphorothioate linkage
  modified_base 1..20: mod_base = OTHER; note = 2'-O-(2-methoxyethyl) ribonucleotide
  modified_base 1: mod_base = OTHER; note = 5-methyl cytidine
  modified_base 6..7: mod_base = OTHER; note = 5-methyl cytidine
  modified_base 13: mod_base = OTHER; note = 5-methyl cytidine
  modified_base 17..18: mod_base = OTHER; note = 5-methyl cytidine
  modified_base 20: mod_base = OTHER; note = 5-methyl cytidine
ctagtcctggagctgaccgc

SEQ ID NO: 637 - RNA, 20 nt, synthetic construct
  source 1..20: mol_type = other RNA
  modified_base 1..20: mod_base = OTHER; note = Phosphorothioate linkage
  modified_base 1..20: mod_base = OTHER; note = 2'-O-(2-methoxyethyl) ribonucleotide
  modified_base 1..3: mod_base = OTHER; note = 5-methyl cytidine
  modified_base 8..9: mod_base = OTHER; note = 5-methyl cytidine
  modified_base 15: mod_base = OTHER; note = 5-methyl cytidine
  modified_base 19..20: mod_base = OTHER; note = 5-methyl cytidine
ccctagtcctggagctgacc

SEQ ID NO: 638 - RNA, 20 nt, synthetic construct
  source 1..20: mol_type = other RNA
  modified_base 1..20: mod_base = OTHER; note = Phosphorothioate linkage
  modified_base 1..20: mod_base = OTHER; note = 2'-O-(2-methoxyethyl) ribonucleotide
  modified_base 3..4: mod_base = OTHER; note = 5-methyl cytidine
  modified_base 8..10: mod_base = OTHER; note = 5-methyl cytidine
  modified_base 15..16: mod_base = OTHER; note = 5-methyl cytidine
ggccaagccctagtcctgga

SEQ ID NO: 639 - DNA, 20 bp, synthetic construct
  source 1..20: mol_type = other DNA
  modified_base 1..20: mod_base = OTHER; note = Phosphorothioate linkage
  modified_base 1..5: mod_base = OTHER; note = 2'-O-(2-methoxyethyl) ribonucleotide
  misc_feature 6..8: note = DNA
  modified_base 9: mod_base = OTHER; note = 2'-O-(2-methoxyethyl) ribonucleotide
  misc_feature 10..11: note = DNA
  modified_base 12: mod_base = OTHER; note = 2'-O-(2-methoxyethyl) ribonucleotide
  misc_feature 13..15: note = DNA
  modified_base 16..20: mod_base = OTHER; note = 2'-O-(2-methoxyethyl) ribonucleotide
  modified_base 4: mod_base = OTHER; note = 5-methyl cytidine
  modified_base 8..9: mod_base = OTHER; note = 5-methyl cytidine
  modified_base 12: mod_base = OTHER; note = 5-methyl cytidine
  modified_base 18..19: mod_base = OTHER; note = 5-methyl cytidine
gagctgaccgccagatgcct

SEQ ID NO: 640 - DNA, 20 bp, synthetic construct
  source 1..20: mol_type = other DNA
  modified_base 1..20: mod_base = OTHER; note = Phosphorothioate linkage
  modified_base 1..5: mod_base = OTHER; note = 2'-O-(2-methoxyethyl) ribonucleotide
  modified_base 6: mod_base = OTHER; note = locked nucleic acid
  misc_feature 7..8: note = DNA
  modified_base 9: mod_base = OTHER; note = locked nucleic acid
  misc_feature 10..11: note = DNA
  modified_base 12: mod_base = OTHER; note = locked nucleic acid
  misc_feature 13..14: note = DNA
  modified_base 15: mod_base = OTHER; note = locked nucleic acid
  modified_base 16..20: mod_base = OTHER; note = 2'-O-(2-methoxyethyl) ribonucleotide
  modified_base 4: mod_base = OTHER; note = 5-methyl cytidine
  modified_base 8..9: mod_base = OTHER; note = 5-methyl cytidine
  modified_base 11..12: mod_base = OTHER; note = 5-methyl cytidine
  modified_base 18..19: mod_base = OTHER; note = 5-methyl cytidine
gagctgaccgccagatgcct

SEQ ID NO: 641 - DNA, 20 bp, synthetic construct
  source 1..20: mol_type = other DNA
  modified_base 1..20: mod_base = OTHER; note = Phosphorothioate linkage
  modified_base 1..3: mod_base = OTHER; note = 2'-O-(2-methoxyethyl) ribonucleotide
  modified_base 4: mod_base = OTHER; note = locked nucleic acid
  modified_base 5: mod_base = OTHER; note = 2'-O-(2-methoxyethyl) ribonucleotide
  misc_feature 6..7: note = DNA
  modified_base 8: mod_base = OTHER; note = locked nucleic acid
  misc_feature 9..11: note = DNA
  modified_base 12: mod_base = OTHER; note = locked nucleic acid
  misc_feature 13..15: note = DNA
  modified_base 16: mod_base = OTHER; note = locked nucleic acid
  modified_base 17..20: mod_base = OTHER; note = 2'-O-(2-methoxyethyl) ribonucleotide
  modified_base 4: mod_base = OTHER; note = 5-methyl cytidine
  modified_base 8..9: mod_base = OTHER; note = 5-methyl cytidine
  modified_base 11..12: mod_base = OTHER; note = 5-methyl cytidine
  modified_base 18..19: mod_base = OTHER; note = 5-methyl cytidine
gagctgaccgccagatgcct

SEQ ID NO: 642 - DNA, 20 bp, synthetic construct
  source 1..20: mol_type = other DNA
  modified_base 1..20: mod_base = OTHER; note = Phosphorothioate linkage
  modified_base 1..4: mod_base = OTHER; note = 2'-O-(2-methoxyethyl) ribonucleotide
  modified_base 5: mod_base = OTHER; note = locked nucleic acid
  misc_feature 6..8: note = DNA
  modified_base 9: mod_base = OTHER; note = locked nucleic acid
  misc_feature 10..12: note = DNA
  modified_base 13: mod_base = OTHER; note = locked nucleic acid
  misc_feature 14..15: note = DNA
  modified_base 16: mod_base = OTHER; note = 2'-O-(2-methoxyethyl) ribonucleotide
  modified_base 17: mod_base = OTHER; note = locked nucleic acid
  modified_base 18..20: mod_base = OTHER; note = 2'-O-(2-methoxyethyl) ribonucleotide
  modified_base 4: mod_base = OTHER; note = 5-methyl cytidine
  modified_base 8..9: mod_base = OTHER; note = 5-methyl cytidine
  modified_base 11..12: mod_base = OTHER; note = 5-methyl cytidine
  modified_base 18..19: mod_base = OTHER; note = 5-methyl cytidine
gagctgaccgccagatgcct

SEQ ID NO: 643 - RNA, 20 nt, synthetic construct
  source 1..20: mol_type = other RNA
  modified_base 1..20: mod_base = OTHER; note = Phosphorothioate linkage
  modified_base 1..5: mod_base = OTHER; note = 2'-O-(2-methoxyethyl) ribonucleotide
  modified_base 6: mod_base = OTHER; note = locked nucleic acid
  modified_base 7..8: mod_base = OTHER; note = 2'-O-(2-methoxyethyl) ribonucleotide
  modified_base 9: mod_base = OTHER; note = locked nucleic acid
  modified_base 10..11: mod_base = OTHER; note = 2'-O-(2-methoxyethyl) ribonucleotide
  modified_base 12: mod_base = OTHER; note = locked nucleic acid
  modified_base 13..14: mod_base = OTHER; note = 2'-O-(2-methoxyethyl) ribonucleotide
  modified_base 15: mod_base = OTHER; note = locked nucleic acid
  modified_base 16..20: mod_base = OTHER; note = 2'-O-(2-methoxyethyl) ribonucleotide
  modified_base 4: mod_base = OTHER; note = 5-methyl cytidine
  modified_base 8..9: mod_base = OTHER; note = 5-methyl cytidine
  modified_base 11..12: mod_base = OTHER; note = 5-methyl cytidine
  modified_base 18..19: mod_base = OTHER; note = 5-methyl cytidine
gagctgaccgccagatgcct

SEQ ID NO: 644 - RNA, 20 nt, synthetic construct
  source 1..20: mol_type = other RNA
  modified_base 1..20: mod_base = OTHER; note = Phosphorothioate linkage
  modified_base 1..3: mod_base = OTHER; note = 2'-O-(2-methoxyethyl) ribonucleotide
  modified_base 4: mod_base = OTHER; note = locked nucleic acid
  modified_base 5: mod_base = OTHER; note = 2'-O-(2-methoxyethyl) ribonucleotide
  modified_base 6: mod_base = OTHER; note = locked nucleic acid
  modified_base 7: mod_base = OTHER; note = 2'-O-(2-methoxyethyl) ribonucleotide
  modified_base 8: mod_base = OTHER; note = locked nucleic acid
  modified_base 9: mod_base = OTHER; note = 2'-O-(2-methoxyethyl) ribonucleotide
  modified_base 10: mod_base = OTHER; note = locked nucleic acid
  modified_base 11: mod_base = OTHER; note = 2'-O-(2-methoxyethyl) ribonucleotide
  modified_base 12: mod_base = OTHER; note = locked nucleic acid
  modified_base 13: mod_base = OTHER; note = 2'-O-(2-methoxyethyl) ribonucleotide
  modified_base 14: mod_base = OTHER; note = locked nucleic acid
  modified_base 15: mod_base = OTHER; note = 2'-O-(2-methoxyethyl) ribonucleotide
  modified_base 16: mod_base = OTHER; note = locked nucleic acid
  modified_base 17: mod_base = OTHER; note = 2'-O-(2-methoxyethyl) ribonucleotide
  modified_base 18: mod_base = OTHER; note = locked nucleic acid
  modified_base 19..20: mod_base = OTHER; note = 2'-O-(2-methoxyethyl) ribonucleotide
  modified_base 4: mod_base = OTHER; note = 5-methyl cytidine
  modified_base 8..9: mod_base = OTHER; note = 5-methyl cytidine
  modified_base 11..12: mod_base = OTHER; note = 5-methyl cytidine
  modified_base 18..19: mod_base = OTHER; note = 5-methyl cytidine
gagctgaccgccagatgcct

SEQ ID NO: 645 - RNA, 20 nt, synthetic construct
  source 1..20: mol_type = other RNA
  modified_base 1..20: mod_base = OTHER; note = Phosphorothioate linkage
  modified_base 1..2: mod_base = OTHER; note = 2'-O-(2-methoxyethyl) ribonucleotide
  modified_base 3: mod_base = OTHER; note = locked nucleic acid
  modified_base 4: mod_base = OTHER; note = 2'-O-(2-methoxyethyl) ribonucleotide
  modified_base 5: mod_base = OTHER; note = locked nucleic acid
  modified_base 6: mod_base = OTHER; note = 2'-O-(2-methoxyethyl) ribonucleotide
  modified_base 7: mod_base = OTHER; note = locked nucleic acid
  modified_base 8: mod_base = OTHER; note = 2'-O-(2-methoxyethyl) ribonucleotide
  modified_base 9: mod_base = OTHER; note = locked nucleic acid
  modified_base 10: mod_base = OTHER; note = 2'-O-(2-methoxyethyl) ribonucleotide
  modified_base 11: mod_base = OTHER; note = locked nucleic acid
  modified_base 12: mod_base = OTHER; note = 2'-O-(2-methoxyethyl) ribonucleotide
  modified_base 13: mod_base = OTHER; note = locked nucleic acid
  modified_base 14: mod_base = OTHER; note = 2'-O-(2-methoxyethyl) ribonucleotide
  modified_base 15: mod_base = OTHER; note = locked nucleic acid
  modified_base 16: mod_base = OTHER; note = 2'-O-(2-methoxyethyl) ribonucleotide
  modified_base 17: mod_base = OTHER; note = locked nucleic acid
  modified_base 18..20: mod_base = OTHER; note = 2'-O-(2-methoxyethyl) ribonucleotide
  modified_base 4: mod_base = OTHER; note = 5-methyl cytidine
  modified_base 8..9: mod_base = OTHER; note = 5-methyl cytidine
  modified_base 11..12: mod_base = OTHER; note = 5-methyl cytidine
  modified_base 18..19: mod_base = OTHER; note = 5-methyl cytidine
gagctgaccgccagatgcct

SEQ ID NO: 646 - RNA, 20 nt, synthetic construct
  source 1..20: mol_type = other RNA
  modified_base 1..20: mod_base = OTHER; note = Phosphorothioate linkage
  modified_base 1..2: mod_base = OTHER; note = 2'-O-(2-methoxyethyl) ribonucleotide
  modified_base 3: mod_base = OTHER; note = locked nucleic acid
  modified_base 4..5: mod_base = OTHER; note = 2'-O-(2-methoxyethyl) ribonucleotide
  modified_base 6: mod_base = OTHER; note = locked nucleic acid
  modified_base 7..8: mod_base = OTHER; note = 2'-O-(2-methoxyethyl) ribonucleotide
  modified_base 9: mod_base = OTHER; note = locked nucleic acid
  modified_base 10..11: mod_base = OTHER; note = 2'-O-(2-methoxyethyl) ribonucleotide
  modified_base 12: mod_base = OTHER; note = locked nucleic acid
  modified_base 13..14: mod_base = OTHER; note = 2'-O-(2-methoxyethyl) ribonucleotide
  modified_base 15: mod_base = OTHER; note = locked nucleic acid
  modified_base 16..17: mod_base = OTHER; note = 2'-O-(2-methoxyethyl) ribonucleotide
  modified_base 18: mod_base = OTHER; note = locked nucleic acid
  modified_base 19..20: mod_base = OTHER; note = 2'-O-(2-methoxyethyl) ribonucleotide
  modified_base 4: mod_base = OTHER; note = 5-methyl cytidine
  modified_base 8..9: mod_base = OTHER; note = 5-methyl cytidine
  modified_base 11..12: mod_base = OTHER; note = 5-methyl cytidine
  modified_base 18..19: mod_base = OTHER; note = 5-methyl cytidine
gagctgaccgccagatgcct

SEQ ID NO: 647 - RNA, 20 nt, synthetic construct
  source 1..20: mol_type = other RNA
  modified_base 1..20: mod_base = OTHER; note = Phosphorothioate linkage
  modified_base 1..3: mod_base = OTHER; note = 2'-O-(2-methoxyethyl) ribonucleotide
  modified_base 4: mod_base = OTHER; note = locked nucleic acid
  modified_base 5..7: mod_base = OTHER; note = 2'-O-(2-methoxyethyl) ribonucleotide
  modified_base 8: mod_base = OTHER; note = locked nucleic acid
  modified_base 9..11: mod_base = OTHER; note = 2'-O-(2-methoxyethyl) ribonucleotide
  modified_base 12: mod_base = OTHER; note = locked nucleic acid
  modified_base 13..15: mod_base = OTHER; note = 2'-O-(2-methoxyethyl) ribonucleotide
  modified_base 16: mod_base = OTHER; note = locked nucleic acid
  modified_base 17..20: mod_base = OTHER; note = 2'-O-(2-methoxyethyl) ribonucleotide
  modified_base 4: mod_base = OTHER; note = 5-methyl cytidine
  modified_base 8..9: mod_base = OTHER; note = 5-methyl cytidine
  modified_base 11..12: mod_base = OTHER; note = 5-methyl cytidine
  modified_base 18..19: mod_base = OTHER; note = 5-methyl cytidine
gagctgaccgccagatgcct

SEQ ID NO: 648 - RNA, 20 nt, synthetic construct
  source 1..20: mol_type = other RNA
  modified_base 1..20: mod_base = OTHER; note = Phosphorothioate linkage
  modified_base 1..4: mod_base = OTHER; note = 2'-O-(2-methoxyethyl) ribonucleotide
  modified_base 5: mod_base = OTHER; note = locked nucleic acid
  modified_base 6..9: mod_base = OTHER; note = 2'-O-(2-methoxyethyl) ribonucleotide
  modified_base 10: mod_base = OTHER; note = locked nucleic acid
  modified_base 11..14: mod_base = OTHER; note = 2'-O-(2-methoxyethyl) ribonucleotide
  modified_base 15: mod_base = OTHER; note = locked nucleic acid
  modified_base 16..20: mod_base = OTHER; note = 2'-O-(2-methoxyethyl) ribonucleotide
  modified_base 5: mod_base = OTHER; note = 5-methyl cytidine
  modified_base 10: mod_base = OTHER; note = 5-methyl cytidine
  modified_base 15: mod_base = OTHER; note = 5-methyl cytidine
gagctgaccgccagatgcct

SEQ ID NO: 649 - RNA, 20 nt, synthetic construct
  source 1..20: mol_type = other RNA
  modified_base 1..20: mod_base = OTHER; note = Phosphorothioate linkage
  modified_base 1..5: mod_base = OTHER; note = 2'-O-(2-methoxyethyl) ribonucleotide
  modified_base 6: mod_base = OTHER; note = locked nucleic acid
  modified_base 7..10: mod_base = OTHER; note = 2'-O-(2-methoxyethyl) ribonucleotide
  modified_base 11: mod_base = OTHER; note = locked nucleic acid
  modified_base 12..15: mod_base = OTHER; note = 2'-O-(2-methoxyethyl) ribonucleotide
  modified_base 16: mod_base = OTHER; note = locked nucleic acid
  modified_base 17..20: mod_base = OTHER; note = 2'-O-(2-methoxyethyl) ribonucleotide
  modified_base 4: mod_base = OTHER; note = 5-methyl cytidine
  modified_base 8..9: mod_base = OTHER; note = 5-methyl cytidine
  modified_base 11..12: mod_base = OTHER; note = 5-methyl cytidine
  modified_base 18..19: mod_base = OTHER; note = 5-methyl cytidine
gagctgaccgccagatgcct

SEQ ID NO: 650 - RNA, 20 nt, synthetic construct
  source 1..20: mol_type = other RNA
  modified_base 1..20: mod_base = OTHER; note = Phosphorothioate linkage
  modified_base 1..4: mod_base = OTHER; note = 2'-O-(2-methoxyethyl) ribonucleotide
  modified_base 5: mod_base = OTHER; note = locked nucleic acid
  modified_base 6..9: mod_base = OTHER; note = 2'-O-(2-methoxyethyl) ribonucleotide
  modified_base 10: mod_base = OTHER; note = locked nucleic acid
  modified_base 11..14: mod_base = OTHER; note = 2'-O-(2-methoxyethyl) ribonucleotide
  modified_base 15: mod_base = OTHER; note = locked nucleic acid
  modified_base 16..20: mod_base = OTHER; note = 2'-O-(2-methoxyethyl) ribonucleotide
  modified_base 4: mod_base = OTHER; note = 5-methyl cytidine
  modified_base 8..9: mod_base = OTHER; note = 5-methyl cytidine
  modified_base 11..12: mod_base = OTHER; note = 5-methyl cytidine
  modified_base 18..19: mod_base = OTHER; note = 5-methyl cytidine
gagctgaccgccagatgcct

SEQ ID NO: 651 - DNA, 22 bp, synthetic construct
  source 1..22: mol_type = other DNA
  modified_base 1..22: mod_base = OTHER; note = Phosphorothioate linkage
  modified_base 1..6: mod_base = OTHER; note = 2'-O-(2-methoxyethyl) ribonucleotide
  misc_feature 7..16: note = DNA
  modified_base 17..22: mod_base = OTHER; note = 2'-O-(2-methoxyethyl) ribonucleotide
  modified_base 5: mod_base = OTHER; note = 5-methyl cytidine
  modified_base 9..10: mod_base = OTHER; note = 5-methyl cytidine
  modified_base 12..13: mod_base = OTHER; note = 5-methyl cytidine
  modified_base 19..20: mod_base = OTHER; note = 5-methyl cytidine
  modified_base 22: mod_base = OTHER; note = 5-methyl cytidine
ggagctgaccgccagatgcctc

SEQ ID NO: 652 - RNA, 22 nt, synthetic construct
  source 1..22: mol_type = other RNA
  modified_base 1..22: mod_base = OTHER; note = Phosphorothioate linkage
  modified_base 1..22: mod_base = OTHER; note = 2'-O-(2-methoxyethyl) ribonucleotide
  modified_base 5: mod_base = OTHER; note = 5-methyl cytidine
  modified_base 9..10: mod_base = OTHER; note = 5-methyl cytidine
  modified_base 12..13: mod_base = OTHER; note = 5-methyl cytidine
  modified_base 19..20: mod_base = OTHER; note = 5-methyl cytidine
  modified_base 22: mod_base = OTHER; note = 5-methyl cytidine
ggagctgaccgccagatgcctc

SEQ ID NO: 653 - DNA, 22 bp, synthetic construct
  source 1..22: mol_type = other DNA
  modified_base 1..22: mod_base = OTHER; note = Phosphorothioate linkage
  modified_base 1..5: mod_base = OTHER; note = 2'-O-(2-methoxyethyl) ribonucleotide
  misc_feature 6..8: note = DNA
  modified_base 9: mod_base = OTHER; note = 2'-O-(2-methoxyethyl) ribonucleotide
  misc_feature 10..13: note = DNA
  modified_base 14: mod_base = OTHER; note = 2'-O-(2-methoxyethyl) ribonucleotide
  misc_feature 15..17: note = DNA
  modified_base 18..22: mod_base = OTHER; note = 2'-O-(2-methoxyethyl) ribonucleotide
  modified_base 5: mod_base = OTHER; note = 5-methyl cytidine
  modified_base 9..10: mod_base = OTHER; note = 5-methyl cytidine
  modified_base 12..13: mod_base = OTHER; note = 5-methyl cytidine
  modified_base 19: mod_base = OTHER; note = 5-methyl cytidine
  modified_base 22: mod_base = OTHER; note = 5-methyl cytidine
ggagctgaccgccagatgcctc

SEQ ID NO: 654 - DNA, 22 bp, synthetic construct
  source 1..22: mol_type = other DNA
  modified_base 1..22: mod_base = OTHER; note = Phosphorothioate linkage
  modified_base 1..5: mod_base = OTHER; note = 2'-O-(2-methoxyethyl) ribonucleotide
  modified_base 6: mod_base = OTHER; note = locked nucleic acid
  misc_feature 7..8: note = DNA
  modified_base 9: mod_base = OTHER; note = locked nucleic acid
  misc_feature 10..13: note = DNA
  modified_base 14: mod_base = OTHER; note = 2'-O-(2-methoxyethyl) ribonucleotide
  misc_feature 15..16: note = DNA
  modified_base 17: mod_base = OTHER; note = locked nucleic acid
  modified_base 18..22: mod_base = OTHER; note = 2'-O-(2-methoxyethyl) ribonucleotide
  modified_base 5: mod_base = OTHER; note = 5-methyl cytidine
  modified_base 9..10: mod_base = OTHER; note = 5-methyl cytidine
  modified_base 12..13: mod_base = OTHER; note = 5-methyl cytidine
  modified_base 19..20: mod_base = OTHER; note = 5-methyl cytidine
  modified_base 22: mod_base = OTHER; note = 5-methyl cytidine
ggagctgaccgccagatgcctc

SEQ ID NO: 655 - DNA, 24 bp, synthetic construct
  source 1..24: mol_type = other DNA
  modified_base 1..24: mod_base = OTHER; note = Phosphorothioate linkage
  modified_base 1..7: mod_base = OTHER; note = 2'-O-(2-methoxyethyl) ribonucleotide
  misc_feature 8..17: note = DNA
  modified_base 18..24: mod_base = OTHER; note = 2'-O-(2-methoxyethyl) ribonucleotide
  modified_base 6: mod_base = OTHER; note = 5-methyl cytidine
  modified_base 10..11: mod_base = OTHER; note = 5-methyl cytidine
  modified_base 13..14: mod_base = OTHER; note = 5-methyl cytidine
  modified_base 20..21: mod_base = OTHER; note = 5-methyl cytidine
  modified_base 24: mod_base = OTHER; note = 5-methyl cytidine
tggagctgaccgccagatgcctcc

SEQ ID NO: 656 - RNA, 24 nt, synthetic construct
  source 1..24: mol_type = other RNA
  modified_base 1..24: mod_base = OTHER; note = Phosphorothioate linkage
  modified_base 1..24: mod_base = OTHER; note = 2'-O-(2-methoxyethyl) ribonucleotide
  modified_base 6: mod_base = OTHER; note = 5-methyl cytidine
  modified_base 10..11: mod_base = OTHER; note = 5-methyl cytidine
  modified_base 13..14: mod_base = OTHER; note = 5-methyl cytidine
  modified_base 20..21: mod_base = OTHER; note = 5-methyl cytidine
  modified_base 23..24: mod_base = OTHER; note = 5-methyl cytidine
tggagctgaccgccagatgcctcc

SEQ ID NO: 657 - DNA, 24 bp, synthetic construct
  source 1..24: mol_type = other DNA
  modified_base 1..24: mod_base = OTHER; note = Phosphorothioate linkage
  modified_base 1..5: mod_base = OTHER; note = 2'-O-(2-methoxyethyl) ribonucleotide
  misc_feature 6..7: note = DNA
  modified_base 8: mod_base = OTHER; note = 2'-O-(2-methoxyethyl) ribonucleotide
  misc_feature 9..10: note = DNA
  modified_base 11: mod_base = OTHER; note = 2'-O-(2-methoxyethyl) ribonucleotide
  misc_feature 12..13: note = DNA
  modified_base 14: mod_base = OTHER; note = 2'-O-(2-methoxyethyl) ribonucleotide
  misc_feature 15..16: note = DNA
  modified_base 17: mod_base = OTHER; note = 2'-O-(2-methoxyethyl) ribonucleotide
  misc_feature 18..19: note = DNA
  modified_base 20..24: mod_base = OTHER; note = 2'-O-(2-methoxyethyl) ribonucleotide
  modified_base 6: mod_base = OTHER; note = 5-methyl cytidine
  modified_base 10..11: mod_base = OTHER; note = 5-methyl cytidine
  modified_base 13..14: mod_base = OTHER; note = 5-methyl cytidine
  modified_base 20..21: mod_base = OTHER; note = 5-methyl cytidine
  modified_base 23..24: mod_base = OTHER; note = 5-methyl cytidine
tggagctgaccgccagatgcctcc

SEQ ID NO: 658 - DNA, 24 bp, synthetic construct
  source 1..24: mol_type = other DNA
  modified_base 1..24: mod_base = OTHER; note = Phosphorothioate linkage
  modified_base 1..5: mod_base = OTHER; note = 2'-O-(2-methoxyethyl) ribonucleotide
  misc_feature 6..7: note = DNA
  modified_base 8: mod_base = OTHER; note = locked nucleic acid
  misc_feature 9..10: note = DNA
  modified_base 11: mod_base = OTHER; note = locked nucleic acid
  misc_feature 12..13: note = DNA
  modified_base 14: mod_base = OTHER; note = locked nucleic acid
  misc_feature 15..16: note = DNA
  modified_base 17: mod_base = OTHER; note = locked nucleic acid
  misc_feature 18..19: note = DNA
  modified_base 20..24: mod_base = OTHER; note = 2'-O-(2-methoxyethyl) ribonucleotide
  modified_base 6: mod_base = OTHER; note = 5-methyl cytidine
  modified_base 10..11: mod_base = OTHER; note = 5-methyl cytidine
  modified_base 13..14: mod_base = OTHER; note = 5-methyl cytidine
  modified_base 20..21: mod_base = OTHER; note = 5-methyl cytidine
  modified_base 23..24: mod_base = OTHER; note = 5-methyl cytidine
tggagctgaccgccagatgcctcc

SEQ ID NO: 659 - RNA, 20 nt, synthetic construct
  source 1..20: mol_type = other RNA
  modified_base 1..20: mod_base = OTHER; note = Phosphorothioate linkage
  modified_base 1..20: mod_base = OTHER; note = 2'-O-(2-methoxyethyl) ribonucleotide
  modified_base 4..5: mod_base = OTHER; note = 5-methyl cytidine
  modified_base 9: mod_base = OTHER; note = 5-methyl cytidine
  modified_base 14..17: mod_base = OTHER; note = 5-methyl cytidine
ggaccaaactagaccccatt

SEQ ID NO: 660 - RNA, 20 nt, synthetic construct
  source 1..20: mol_type = other RNA
  modified_base 1..20: mod_base = OTHER; note = Phosphorothioate linkage
  modified_base 1..20: mod_base = OTHER; note = 2'-O-(2-methoxyethyl) ribonucleotide
  modified_base 7..9: mod_base = OTHER; note = 5-methyl cytidine
  modified_base 15: mod_base = OTHER; note = 5-methyl cytidine
  modified_base 20: mod_base = OTHER; note = 5-methyl cytidine
tggatacccaggtacaggac

SEQ ID NO: 661 - RNA, 20 nt, synthetic construct
  source 1..20: mol_type = other RNA
  modified_base 1..20: mod_base = OTHER; note = Phosphorothioate linkage
  modified_base 1..20: mod_base = OTHER; note = 2'-O-(2-methoxyethyl) ribonucleotide
  modified_base 4..5: mod_base = OTHER; note = 5-methyl cytidine
  modified_base 9: mod_base = OTHER; note = 5-methyl cytidine
  modified_base 12..13: mod_base = OTHER; note = 5-methyl cytidine
  modified_base 20: mod_base = OTHER; note = 5-methyl cytidine
tgaccaagctgcctggatac

SEQ ID NO: 662 - RNA, 20 nt, synthetic construct
  source 1..20: mol_type = other RNA
  modified_base 1..20: mod_base = OTHER; note = Phosphorothioate linkage
  modified_base 1..20: mod_base = OTHER; note = 2'-O-(2-methoxyethyl) ribonucleotide
  modified_base 2: mod_base = OTHER; note = 5-methyl cytidine
  modified_base 5: mod_base = OTHER; note = 5-methyl cytidine
  modified_base 7..8: mod_base = OTHER; note = 5-methyl cytidine
  modified_base 10: mod_base = OTHER; note = 5-methyl cytidine
  modified_base 15: mod_base = OTHER; note = 5-methyl cytidine
  modified_base 17..18: mod_base = OTHER; note = 5-methyl cytidine
actacaccacggatctcctg

SEQ ID NO: 663 - RNA, 20 nt, synthetic construct
  source 1..20: mol_type = other RNA
  modified_base 1..20: mod_base = OTHER; note = Phosphorothioate linkage
  modified_base 1..20: mod_base = OTHER; note = 2'-O-(2-methoxyethyl) ribonucleotide
  modified_base 3..4: mod_base = OTHER; note = 5-methyl cytidine
  modified_base 8..9: mod_base = OTHER; note = 5-methyl cytidine
  modified_base 15: mod_base = OTHER; note = 5-methyl cytidine
  modified_base 18: mod_base = OTHER; note = 5-methyl cytidine
  modified_base 20: mod_base = OTHER; note = 5-methyl cytidine
tgcctatccaagaactacac

SEQ ID NO: 664 - RNA, 20 nt, synthetic construct
  source 1..20: mol_type = other RNA
  modified_base 1..20: mod_base = OTHER; note = Phosphorothioate linkage
  modified_base 1..20: mod_base = OTHER; note = 2'-O-(2-methoxyethyl) ribonucleotide
  modified_base 4..5: mod_base = OTHER; note = 5-methyl cytidine
  modified_base 16..17: mod_base = OTHER; note = 5-methyl cytidine
gatccagagtaagtgcctat

SEQ ID NO: 665 - RNA, 20 nt, synthetic construct
  source 1..20: mol_type = other RNA
  modified_base 1..20: mod_base = OTHER; note = Phosphorothioate linkage
  modified_base 1..20: mod_base = OTHER; note = 2'-O-(2-methoxyethyl) ribonucleotide
  modified_base 9..10: mod_base = OTHER; note = 5-methyl cytidine
  modified_base 15..16: mod_base = OTHER; note = 5-methyl cytidine
gtatgtgacctgatccagag

SEQ ID NO: 666 - RNA, 20 nt, synthetic construct
  source 1..20: mol_type = other RNA
  modified_base 1..20: mod_base = OTHER; note = Phosphorothioate linkage
  modified_base 1..20: mod_base = OTHER; note = 2'-O-(2-methoxyethyl) ribonucleotide
  modified_base 3..7: mod_base = OTHER; note = 5-methyl cytidine
  modified_base 12: mod_base = OTHER; note = 5-methyl cytidine
  modified_base 14: mod_base = OTHER; note = 5-methyl cytidine
tgcccccaggacactgtatg

SEQ ID NO: 667 - RNA, 20 nt, synthetic construct
  source 1..20: mol_type = other RNA
  modified_base 1..20: mod_base = OTHER; note = Phosphorothioate linkage
  modified_base 1..20: mod_base = OTHER; note = 2'-O-(2-methoxyethyl) ribonucleotide
  modified_base 3: mod_base = OTHER; note = 5-methyl cytidine
  modified_base 6: mod_base = OTHER; note = 5-methyl cytidine
  modified_base 11..12: mod_base = OTHER; note = 5-methyl cytidine
  modified_base 15..16: mod_base = OTHER; note = 5-methyl cytidine
  modified_base 18..19: mod_base = OTHER; note = 5-methyl cytidine
atctgctgttccgaccacct

SEQ ID NO: 668 - RNA, 20 nt, synthetic construct
  source 1..20: mol_type = other RNA
  modified_base 1..20: mod_base = OTHER; note = Phosphorothioate linkage
  modified_base 1..20: mod_base = OTHER; note = 2'-O-(2-methoxyethyl) ribonucleotide
  modified_base 3..4: mod_base = OTHER; note = 5-methyl cytidine
  modified_base 9..10: mod_base = OTHER; note = 5-methyl cytidine
  modified_base 13: mod_base = OTHER; note = 5-methyl cytidine
  modified_base 16: mod_base = OTHER; note = 5-methyl cytidine
aacctaggccatctgctgtt

SEQ ID NO: 669 - RNA, 20 nt, synthetic construct
  source 1..20: mol_type = other RNA
  modified_base 1..20: mod_base = OTHER; note = Phosphorothioate linkage
  modified_base 1..20: mod_base = OTHER; note = 2'-O-(2-methoxyethyl) ribonucleotide
  modified_base 3: mod_base = OTHER; note = 5-methyl cytidine
  modified_base 8..10: mod_base = OTHER; note = 5-methyl cytidine
  modified_base 13..14: mod_base = OTHER; note = 5-methyl cytidine
  modified_base 19..20: mod_base = OTHER; note = 5-methyl cytidine
tacttgtcccaacctaggcc

SEQ ID NO: 670 - RNA, 20 nt, synthetic construct
  source 1..20: mol_type = other RNA
  modified_base 1..20: mod_base = OTHER; note = Phosphorothioate linkage
  modified_base 1..20: mod_base = OTHER; note = 2'-O-(2-methoxyethyl) ribonucleotide
  modified_base 8: mod_base = OTHER; note = 5-methyl cytidine
  modified_base 14: mod_base = OTHER; note = 5-methyl cytidine
  modified_base 20: mod_base = OTHER; note = 5-methyl cytidine
tggagttcagagacttatac

SEQ ID NO: 671 - RNA, 20 nt, synthetic construct
  source 1..20: mol_type = other RNA
  modified_base 1..20: mod_base = OTHER; note = Phosphorothioate linkage
  modified_base 1..20: mod_base = OTHER; note = 2'-O-(2-methoxyethyl) ribonucleotide
  modified_base 4..5: mod_base = OTHER; note = 5-methyl cytidine
  modified_base 7: mod_base = OTHER; note = 5-methyl cytidine
  modified_base 9: mod_base = OTHER; note = 5-methyl cytidine
  modified_base 12: mod_base = OTHER; note = 5-methyl cytidine
  modified_base 20: mod_base = OTHER; note = 5-methyl cytidine
tgtcctcactactggagttc

SEQ ID NO: 672 - RNA, 20 nt, synthetic construct
  source 1..20: mol_type = other RNA
  modified_base 1..20: mod_base = OTHER; note = Phosphorothioate linkage
  modified_base 1..20: mod_base = OTHER; note = 2'-O-(2-methoxyethyl) ribonucleotide
  modified_base 3: mod_base = OTHER; note = 5-methyl cytidine
  modified_base 6..7: mod_base = OTHER; note = 5-methyl cytidine
  modified_base 11: mod_base = OTHER; note = 5-methyl cytidine
  modified_base 13: mod_base = OTHER; note = 5-methyl cytidine
  modified_base 15: mod_base = OTHER; note = 5-methyl cytidine
  modified_base 17..19: mod_base = OTHER; note = 5-methyl cytidine
atcagcctggctcgctccct

SEQ ID NO: 673 - RNA, 20 nt, synthetic construct
  source 1..20: mol_type = other RNA
  modified_base 1..20: mod_base = OTHER; note = Phosphorothioate linkage
  modified_base 1..20: mod_base = OTHER; note = 2'-O-(2-methoxyethyl) ribonucleotide
  modified_base 7: mod_base = OTHER; note = 5-methyl cytidine
  modified_base 9: mod_base = OTHER; note = 5-methyl cytidine
  modified_base 13: mod_base = OTHER; note = 5-methyl cytidine
  modified_base 16..17: mod_base = OTHER; note = 5-methyl cytidine
agtgtacgctatcagcctgg

SEQ ID NO: 674 - RNA, 20 nt, synthetic construct
  source 1..20: mol_type = other RNA
  modified_base 1..20: mod_base = OTHER; note = Phosphorothioate linkage
  modified_base 1..20: mod_base = OTHER; note = 2'-O-(2-methoxyethyl) ribonucleotide
  modified_base 1: mod_base = OTHER; note = 5-methyl cytidine
  modified_base 18: mod_base = OTHER; note = 5-methyl cytidine
  modified_base 20: mod_base = OTHER; note = 5-methyl cytidine
cggtttgaaatagtgtacgc

SEQ ID NO: 675 - RNA, 20 nt, synthetic construct
  source 1..20: mol_type = other RNA
  modified_base 1..20: mod_base = OTHER; note = Phosphorothioate linkage
  modified_base 1..20: mod_base = OTHER; note = 2'-O-(2-methoxyethyl) ribonucleotide
  modified_base 2: mod_base = OTHER; note = 5-methyl cytidine
  modified_base 4: mod_base = OTHER; note = 5-methyl cytidine
  modified_base 8: mod_base = OTHER; note = 5-methyl cytidine
  modified_base 11..15: mod_base = OTHER; note = 5-methyl cytidine
gctcatgctgccccctagtg

SEQ ID NO: 676 - RNA, 20 nt, synthetic construct
  source 1..20: mol_type = other RNA
  modified_base 1..20: mod_base = OTHER; note = Phosphorothioate linkage
  modified_base 1..20: mod_base = OTHER; note = 2'-O-(2-methoxyethyl) ribonucleotide
  modified_base 1: mod_base = OTHER; note = 5-methyl cytidine
  modified_base 6..8: mod_base = OTHER; note = 5-methyl cytidine
  modified_base 15: mod_base = OTHER; note = 5-methyl cytidine
  modified_base 17: mod_base = OTHER; note = 5-methyl cytidine
ctgatccctgagagctctaa

SEQ ID NO: 677 - RNA, 20 nt, synthetic construct
  source 1..20: mol_type = other RNA
  modified_base 1..20: mod_base = OTHER; note = Phosphorothioate linkage
  modified_base 1..20: mod_base = OTHER; note = 2'-O-(2-methoxyethyl) ribonucleotide
  modified_base 2: mod_base = OTHER; note = 5-methyl cytidine
  modified_base 6: mod_base = OTHER; note = 5-methyl cytidine
  modified_base 14: mod_base = OTHER; note = 5-methyl cytidine
  modified_base 16..17: mod_base = OTHER; note = 5-methyl cytidine
tcttacaaggaggctccaag

SEQ ID NO: 678 - RNA, 20 nt, synthetic construct
  source 1..20: mol_type = other RNA
  modified_base 1..20: mod_base = OTHER; note = Phosphorothioate linkage
  modified_base 1..20: mod_base = OTHER; note = 2'-O-(2-methoxyethyl) ribonucleotide
  modified_base 2..4: mod_base = OTHER; note = 5-methyl cytidine
  modified_base 14: mod_base = OTHER; note = 5-methyl cytidine
  modified_base 18: mod_base = OTHER; note = 5-methyl cytidine
gcccatatatagtcttacaa

SEQ ID NO: 679 - RNA, 20 nt, synthetic construct
  source 1..20: mol_type = other RNA
  modified_base 1..20: mod_base = OTHER; note = Phosphorothioate linkage
  modified_base 1..20: mod_base = OTHER; note = 2'-O-(2-methoxyethyl) ribonucleotide
  modified_base 6..9: mod_base = OTHER; note = 5-methyl cytidine
  modified_base 14..16: mod_base = OTHER; note = 5-methyl cytidine
ggattcccctgagcccatat

SEQ ID NO: 680 - RNA, 20 nt, synthetic construct
  source 1..20: mol_type = other RNA
  modified_base 1..20: mod_base = OTHER; note = Phosphorothioate linkage
  modified_base 1..20: mod_base = OTHER; note = 2'-O-(2-methoxyethyl) ribonucleotide
  modified_base 9: mod_base = OTHER; note = 5-methyl cytidine
  modified_base 16..19: mod_base = OTHER; note = 5-methyl cytidine
gtgaatggctggattcccct

SEQ ID NO: 681 - RNA, 20 nt, synthetic construct
  source 1..20: mol_type = other RNA
  modified_base 1..20: mod_base = OTHER; note = Phosphorothioate linkage
  modified_base 1..20: mod_base = OTHER; note = 2'-O-(2-methoxyethyl) ribonucleotide
  modified_base 1..3: mod_base = OTHER; note = 5-methyl cytidine
  modified_base 19: mod_base = OTHER; note = 5-methyl cytidine
cccaatgtgagtgaatggct

SEQ ID NO: 682 - RNA, 20 nt, synthetic construct
  source 1..20: mol_type = other RNA
  modified_base 1..20: mod_base = OTHER; note = Phosphorothioate linkage
  modified_base 1..20: mod_base = OTHER; note = 2'-O-(2-methoxyethyl) ribonucleotide
  modified_base 2: mod_base = OTHER; note = 5-methyl cytidine
  modified_base 5: mod_base = OTHER; note = 5-methyl cytidine
  modified_base 9..10: mod_base = OTHER; note = 5-methyl cytidine
  modified_base 15..17: mod_base = OTHER; note = 5-methyl cytidine
gctgctgtccaatgcccaat

SEQ ID NO: 683 - RNA, 20 nt, synthetic construct
  source 1..20: mol_type = other RNA
  modified_base 1..20: mod_base = OTHER; note = Phosphorothioate linkage
  modified_base 1..20: mod_base = OTHER; note = 2'-O-(2-methoxyethyl) ribonucleotide
  modified_base 1..2: mod_base = OTHER; note = 5-methyl cytidine
  modified_base 4: mod_base = OTHER; note = 5-methyl cytidine
  modified_base 17: mod_base = OTHER; note = 5-methyl cytidine
  modified_base 20: mod_base = OTHER; note = 5-methyl cytidine
ccactgggaagtatggctgc

SEQ ID NO: 684 - RNA, 20 nt, synthetic construct
  source 1..20: mol_type = other RNA
  modified_base 1..20: mod_base = OTHER; note = Phosphorothioate linkage
  modified_base 1..20: mod_base = OTHER; note = 2'-O-(2-methoxyethyl) ribonucleotide
  modified_base 3: mod_base = OTHER; note = 5-methyl cytidine
  modified_base 10: mod_base = OTHER; note = 5-methyl cytidine
  modified_base 13..15: mod_base = OTHER; note = 5-methyl cytidine
  modified_base 17: mod_base = OTHER; note = 5-methyl cytidine
tgctgtgagctacccactgg

SEQ ID NO: 685 - RNA, 20 nt, synthetic construct
  source 1..20: mol_type = other RNA
  modified_base 1..20: mod_base = OTHER; note = Phosphorothioate linkage
  modified_base 1..20: mod_base = OTHER; note = 2'-O-(2-methoxyethyl) ribonucleotide
  modified_base 6: mod_base = OTHER; note = 5-methyl cytidine
  modified_base 9..10: mod_base = OTHER; note = 5-methyl cytidine
  modified_base 13: mod_base = OTHER; note = 5-methyl cytidine
  modified_base 20: mod_base = OTHER; note = 5-methyl cytidine
tgattctacctgctgtgagc

SEQ ID NO: 686 - RNA, 20 nt, synthetic construct
  source 1..20: mol_type = other RNA
  modified_base 1..20: mod_base = OTHER; note = Phosphorothioate linkage
  modified_base 1..20: mod_base = OTHER; note = 2'-O-(2-methoxyethyl) ribonucleotide
  modified_base 6..8: mod_base = OTHER; note = 5-methyl cytidine
  modified_base 16: mod_base = OTHER; note = 5-methyl cytidine
  modified_base 19..20: mod_base = OTHER; note = 5-methyl cytidine
agtgtcccgatgattctacc

SEQ ID NO: 687 - RNA, 20 nt, synthetic construct
  source 1..20: mol_type = other RNA
  modified_base 1..20: mod_base = OTHER; note = Phosphorothioate linkage
  modified_base 1..20: mod_base = OTHER; note = 2'-O-(2-methoxyethyl) ribonucleotide
  modified_base 3: mod_base = OTHER; note = 5-methyl cytidine
  modified_base 9..11: mod_base = OTHER; note = 5-methyl cytidine
  modified_base 17: mod_base = OTHER; note = 5-methyl cytidine
gtcgtgtgccctgatgctaa

SEQ ID NO: 688 - RNA, 20 nt, synthetic construct
  source 1..20: mol_type = other RNA
  modified_base 1..20: mod_base = OTHER; note = Phosphorothioate linkage
  modified_base 1..20: mod_base = OTHER; note = 2'-O-(2-methoxyethyl) ribonucleotide
  modified_base 2..3: mod_base = OTHER; note = 5-methyl cytidine
  modified_base 9: mod_base = OTHER; note = 5-methyl cytidine
  modified_base 13: mod_base = OTHER; note = 5-methyl cytidine
  modified_base 19..20: mod_base = OTHER; note = 5-methyl cytidine
gcctttttctgtcgtgtgcc

SEQ ID NO: 689 - RNA, 20 nt, synthetic construct
  source 1..20: mol_type = other RNA
  modified_base 1..20: mod_base = OTHER; note = Phosphorothioate linkage
  modified_base 1..20: mod_base = OTHER; note = 2'-O-(2-methoxyethyl) ribonucleotide
  modified_base 3: mod_base = OTHER; note = 5-methyl cytidine
  modified_base 5: mod_base = OTHER; note = 5-methyl cytidine
  modified_base 9: mod_base = OTHER; note = 5-methyl cytidine
  modified_base 15: mod_base = OTHER; note = 5-methyl cytidine
  modified_base 20: mod_base = OTHER; note = 5-methyl cytidine
tgctctttcagtgtctttgc

SEQ ID NO: 690 - RNA, 20 nt, synthetic construct
  source 1..20: mol_type = other RNA
  modified_base 1..20: mod_base = OTHER; note = Phosphorothioate linkage
  modified_base 1..20: mod_base = OTHER; note = 2'-O-(2-methoxyethyl) ribonucleotide
  modified_base 2: mod_base = OTHER; note = 5-methyl cytidine
  modified_base 6..7: mod_base = OTHER; note = 5-methyl cytidine
  modified_base 9: mod_base = OTHER; note = 5-methyl cytidine
  modified_base 14: mod_base = OTHER; note = 5-methyl cytidine
  modified_base 16: mod_base = OTHER; note = 5-methyl cytidine
  modified_base 20: mod_base = OTHER; note = 5-methyl cytidine
acatgcctcattgctctttc

SEQ ID NO: 691 - RNA, 18 nt, synthetic construct
  source 1..18: mol_type = other RNA
  modified_base 1..18: mod_base = OTHER; note = Phosphorothioate linkage
  modified_base 1..4: mod_base = OTHER; note = 2'-O-(2-methoxyethyl) ribonucleotide
  modified_base 5: mod_base = OTHER; note = Locked nucleic acid
  modified_base 6..9: mod_base = OTHER; note = 2'-O-(2-methoxyethyl) ribonucleotide
  modified_base 10: mod_base = OTHER; note = Locked nucleic acid
  modified_base 11..14: mod_base = OTHER; note = 2'-O-(2-methoxyethyl) ribonucleotide
  modified_base 15: mod_base = OTHER; note = Locked nucleic acid
  modified_base 16..18: mod_base = OTHER; note = 2'-O-(2-methoxyethyl) ribonucleotide
  modified_base 3: mod_base = OTHER; note = 5-methyl cytidine
  modified_base 17: mod_base = OTHER; note = 5-methyl cytidine
gacttgggagtggtgact

SEQ ID NO: 692 - RNA, 20 nt, synthetic construct
  source 1..20: mol_type = other RNA
  modified_base 1..3: mod_base = OTHER; note = Phosphorothioate linkage
  modified_base 12..20: mod_base = OTHER; note = Phosphorothioate linkage
  modified_base 1..20: mod_base = OTHER; note = 2'-O-(2-methoxyethyl) ribonucleotide
gttctccctagctgtgtagt

SEQ ID NO: 693 - RNA, 20 nt, synthetic construct
  source 1..20: mol_type = other RNA
  modified_base 1..3: mod_base = OTHER; note = Phosphorothioate linkage
  modified_base 10..20: mod_base = OTHER; note = 2'-O-(2-methoxyethyl) ribonucleotide
gttctccctagctgtgtagt

SEQ ID NO: 694 - RNA, 20 nt, synthetic construct
  source 1..20: mol_type = other RNA
  modified_base 1..20: mod_base = OTHER; note = Phosphorothioate linkage
  modified_base 1..5: mod_base = OTHER; note = 2'-O-(2-methoxyethyl) ribonucleotide
  modified_base 6: mod_base = OTHER; note = locked nucleic acid
  modified_base 7..8: mod_base = OTHER; note = 2'-O-(2-methoxyethyl) ribonucleotide
  modified_base 9: mod_base = OTHER; note = locked nucleic acid
  modified_base 10..11: mod_base = OTHER; note = 2'-O-(2-methoxyethyl) ribonucleotide
  modified_base 12: mod_base = OTHER; note = locked nucleic acid
  modified_base 13..14: mod_base = OTHER; note = 2'-O-(2-methoxyethyl) ribonucleotide
  modified_base 15: mod_base = OTHER; note = locked nucleic acid
  modified_base 16..20: mod_base = OTHER; note = 2'-O-(2-methoxyethyl) ribonucleotide
  modified_base 2..3: mod_base = OTHER; note = 5-methyl cytidine
accagggcgtgatggctgag

SEQ ID NO: 695 - RNA, 20 nt, synthetic construct
  source 1..20: mol_type = other RNA
  modified_base 1..20: mod_base = OTHER; note = Phosphorothioate linkage
  modified_base 1..5: mod_base = OTHER; note = 2'-O-(2-methoxyethyl) ribonucleotide
  modified_base 6: mod_base = OTHER; note = locked nucleic acid
  modified_base 7..8: mod_base = OTHER; note = 2'-O-(2-methoxyethyl) ribonucleotide
  modified_base 9: mod_base = OTHER; note = locked nucleic acid
  modified_base 10..11: mod_base = OTHER; note = 2'-O-(2-methoxyethyl) ribonucleotide
  modified_base 12: mod_base = OTHER; note = locked nucleic acid
  modified_base 13..14: mod_base = OTHER; note = 2'-O-(2-methoxyethyl) ribonucleotide
  modified_base 15: mod_base = OTHER; note = locked nucleic acid
  modified_base 16..20: mod_base = OTHER; note = 2'-O-(2-methoxyethyl) ribonucleotide
  modified_base 5..6: mod_base = OTHER; note = 5-methyl cytidine
  modified_base 11: mod_base = OTHER; note = 5-methyl cytidine
  modified_base 19: mod_base = OTHER; note = 5-methyl cytidine
aggaccagggcgtgatggct

SEQ ID NO: 696 - RNA, 20 nt, synthetic construct
  source 1..20: mol_type = other RNA
  modified_base 1..20: mod_base = OTHER; note = Phosphorothioate linkage
  modified_base 1..5: mod_base = OTHER; note = 2'-O-(2-methoxyethyl) ribonucleotide
  modified_base 6: mod_base = OTHER; note = locked nucleic acid
  modified_base 7..8: mod_base = OTHER; note = 2'-O-(2-methoxyethyl) ribonucleotide
  modified_base 9: mod_base = OTHER; note = locked nucleic acid
  modified_base 10..11: mod_base = OTHER; note = 2'-O-(2-methoxyethyl) ribonucleotide
  modified_base 12: mod_base = OTHER; note = locked nucleic acid
  modified_base 13..14: mod_base = OTHER; note = 2'-O-(2-methoxyethyl) ribonucleotide
  modified_base 15: mod_base = OTHER; note = locked nucleic acid
  modified_base 16..20: mod_base = OTHER; note = 2'-O-(2-methoxyethyl) ribonucleotide
  modified_base 4..5: mod_base = OTHER; note = 5-methyl cytidine
  modified_base 7..8: mod_base = OTHER; note = 5-methyl cytidine
  modified_base 10: mod_base = OTHER; note = 5-methyl cytidine
  modified_base 18: mod_base = OTHER; note = 5-methyl cytidine
ggaccagggcgtgatggctg

SEQ ID NO: 697 - RNA, 20 nt, synthetic construct
  source 1..20: mol_type = other RNA
  modified_base 1..20: mod_base = OTHER; note = Phosphorothioate linkage
  modified_base 1..5: mod_base = OTHER; note = 2'-O-(2-methoxyethyl) ribonucleotide
  modified_base 6: mod_base = OTHER; note = locked nucleic acid
  modified_base 7..8: mod_base = OTHER; note = 2'-O-(2-methoxyethyl) ribonucleotide
  modified_base 9: mod_base = OTHER; note = locked nucleic acid
  modified_base 10..11: mod_base = OTHER; note = 2'-O-(2-methoxyethyl) ribonucleotide
  modified_base 12: mod_base = OTHER; note = locked nucleic acid
  modified_base 13..14: mod_base = OTHER; note = 2'-O-(2-methoxyethyl) ribonucleotide
  modified_base 15: mod_base = OTHER; note = locked nucleic acid
  modified_base 16..20: mod_base = OTHER; note = 2'-O-(2-methoxyethyl) ribonucleotide
  modified_base 7..8: mod_base = OTHER; note = 5-methyl cytidine
  modified_base 3..4: mod_base = OTHER; note = 5-methyl cytidine
  modified_base 9: mod_base = OTHER; note = 5-methyl cytidine
  modified_base 17: mod_base = OTHER; note = 5-methyl cytidine
gaccagggcgtgatggctga

SEQ ID NO: 698 - DNA, 20 bp, synthetic construct
  source 1..20: mol_type = other DNA
  modified_base 1..20: mod_base = OTHER; note = Phosphorothioate linkage
  modified_base 1..5: mod_base = OTHER; note = 2'-O-(2-methoxyethyl) ribonucleotide
  misc_feature 6..15: note = DNA
  modified_base 16..20: mod_base = OTHER; note = 2'-O-(2-methoxyethyl) ribonucleotide
  modified_base 13..14: mod_base = OTHER; note = 5-methyl cytidine
  modified_base 3..4: mod_base = OTHER; note = 5-methyl cytidine
  modified_base 8..10: mod_base = OTHER; note = 5-methyl cytidine
  modified_base 15..16: mod_base = OTHER; note = 5-methyl cytidine
ggccaagccctagtcctgga

SEQ ID NO: 699 - DNA, 20 bp, synthetic construct
  source 1..20: mol_type = other DNA
  modified_base 1..20: mod_base = OTHER; note = Phosphorothioate linkage
  modified_base 1..5: mod_base = OTHER; note = 2'-O-(2-methoxyethyl) ribonucleotide
  misc_feature 6..11: note = DNA
  modified_base 12: mod_base = OTHER; note = 2'-O-(2-methoxyethyl) ribonucleotide
  misc_feature 13..15: note = DNA
  modified_base 16..20: mod_base = OTHER; note = 2'-O-(2-methoxyethyl) ribonucleotide
  modified_base 3..4: mod_base = OTHER; note = 5-methyl cytidine
  modified_base 8..9: mod_base = OTHER; note = 5-methyl cytidine
  modified_base 14..15: mod_base = OTHER; note = 5-methyl cytidine
ggccaagccctagtcctgga

SEQ ID NO: 700 - DNA, 20 bp, synthetic construct
  source 1..20: mol_type = other DNA
  modified_base 1..20: mod_base = OTHER; note = Phosphorothioate linkage
  modified_base 1..5: mod_base = OTHER; note = 2'-O-(2-methoxyethyl) ribonucleotide
  modified_base 6: mod_base = OTHER; note = locked nucleic acid
  misc_feature 7..8: note = DNA
  modified_base 9: mod_base = OTHER; note = locked nucleic acid
  misc_feature 10..11: note = DNA
  modified_base 12: mod_base = OTHER; note = locked nucleic acid
  misc_feature 13..14: note = DNA
  modified_base 15: mod_base = OTHER; note = locked nucleic acid
  modified_base 16..20: mod_base = OTHER; note = 2'-O-(2-methoxyethyl) ribonucleotide
  modified_base 3..4: mod_base = OTHER; note = 5-methyl cytidine
  modified_base 8..9: mod_base = OTHER; note = 5-methyl cytidine
  modified_base 15..16: mod_base = OTHER; note = 5-methyl cytidine
ggccaagccctagtcctgga

SEQ ID NO: 701 - DNA, 20 bp, synthetic construct
  source 1..20: mol_type = other DNA
  modified_base 1..20: mod_base = OTHER; note = Phosphorothioate linkage
  modified_base 1..5: mod_base = OTHER; note = 2'-O-(2-methoxyethyl) ribonucleotide
  misc_feature 6..7: note = DNA
  modified_base 8: mod_base = OTHER; note = locked nucleic acid
  misc_feature 9..11: note = DNA
  modified_base 12: mod_base = OTHER; note = locked nucleic acid
  misc_feature 13..15: note = DNA
  modified_base 16: mod_base = OTHER; note = locked nucleic acid
  modified_base 17..20: mod_base = OTHER; note = 2'-O-(2-methoxyethyl) ribonucleotide
  modified_base 3..4: mod_base = OTHER; note = 5-methyl cytidine
  modified_base 8..10: mod_base = OTHER; note = 5-methyl cytidine
  modified_base 15..16: mod_base = OTHER; note = 5-methyl cytidine
ggccaagccctagtcctgga

SEQ ID NO: 702 - DNA, 20 bp, synthetic construct
  source 1..20: mol_type = other DNA
  modified_base 1..20: mod_base = OTHER; note = Phosphorothioate linkage
  modified_base 1..4: mod_base = OTHER; note = 2'-O-(2-methoxyethyl) ribonucleotide
  modified_base 5: mod_base = OTHER; note = locked nucleic acid
  misc_feature 6..8: note = DNA
  modified_base 9: mod_base = OTHER; note = locked nucleic acid
  misc_feature 10..12: note = DNA
  modified_base 13: mod_base = OTHER; note = locked nucleic acid
  misc_feature 14..15: note = DNA
  modified_base 16: mod_base = OTHER; note = 2'-O-(2-methoxyethyl) ribonucleotide
  modified_base 17: mod_base = OTHER; note = locked nucleic acid
  modified_base 18..20: mod_base = OTHER; note = 2'-O-(2-methoxyethyl) ribonucleotide
  modified_base 3..4: mod_base = OTHER; note = 5-methyl cytidine
  modified_base 8..10: mod_base = OTHER; note = 5-methyl cytidine
  modified_base 15..16: mod_base = OTHER; note = 5-methyl cytidine
ggccaagccctagtcctgga

SEQ ID NO: 703 - RNA, 20 nt, synthetic construct
  source 1..20: mol_type = other RNA
  modified_base 1..20: mod_base = OTHER; note = Phosphorothioate linkage
  modified_base 1..5: mod_base = OTHER; note = 2'-O-(2-methoxyethyl) ribonucleotide
  modified_base 6: mod_base = OTHER; note = locked nucleic acid
  modified_base 7..8: mod_base = OTHER; note = 2'-O-(2-methoxyethyl) ribonucleotide
  modified_base 9: mod_base = OTHER; note = locked nucleic acid
  modified_base 10..11: mod_base = OTHER; note = 2'-O-(2-methoxyethyl) ribonucleotide
  modified_base 12: mod_base = OTHER; note = locked nucleic acid
  modified_base 13..14: mod_base = OTHER; note = 2'-O-(2-methoxyethyl) ribonucleotide
  modified_base 15: mod_base = OTHER; note = locked nucleic acid
  modified_base 16..20: mod_base = OTHER; note = 2'-O-(2-methoxyethyl) ribonucleotide
  modified_base 3..4: mod_base = OTHER; note = 5-methyl cytidine
  modified_base 8..10: mod_base = OTHER; note = 5-methyl cytidine
  modified_base 15..16: mod_base = OTHER; note = 5-methyl cytidine
ggccaagccctagtcctgga

SEQ ID NO: 704 - RNA, 20 nt, synthetic construct
  source 1..20: mol_type = other RNA
  modified_base 1..20: mod_base = OTHER; note = Phosphorothioate linkage
  modified_base 1..3: mod_base = OTHER; note = 2'-O-(2-methoxyethyl) ribonucleotide
  modified_base 4: mod_base = OTHER; note = locked nucleic acid
  modified_base 5: mod_base = OTHER; note = 2'-O-(2-methoxyethyl) ribonucleotide
  modified_base 6: mod_base = OTHER; note = locked nucleic acid
  modified_base 7: mod_base = OTHER; note = 2'-O-(2-methoxyethyl) ribonucleotide
  modified_base 8: mod_base = OTHER; note = locked nucleic acid
  modified_base 9: mod_base = OTHER; note = 2'-O-(2-methoxyethyl) ribonucleotide
  modified_base 10: mod_base = OTHER; note = locked nucleic acid
  modified_base 11: mod_base = OTHER; note = 2'-O-(2-methoxyethyl) ribonucleotide
  modified_base 12: mod_base = OTHER; note = locked nucleic acid
  modified_base 13: mod_base = OTHER; note = 2'-O-(2-methoxyethyl) ribonucleotide
  modified_base 14: mod_base = OTHER; note = locked nucleic acid
  modified_base 15: mod_base = OTHER; note = 2'-O-(2-methoxyethyl) ribonucleotide
  modified_base 16: mod_base = OTHER; note = locked nucleic acid
  modified_base 17: mod_base = OTHER; note = 2'-O-(2-methoxyethyl) ribonucleotide
  modified_base 18: mod_base = OTHER; note = locked nucleic acid
  modified_base 19..20: mod_base = OTHER; note = 2'-O-(2-methoxyethyl) ribonucleotide
  modified_base 3..4: mod_base = OTHER; note = 5-methyl cytidine
  modified_base 8..10: mod_base = OTHER; note = 5-methyl cytidine
  modified_base 15..16: mod_base = OTHER; note = 5-methyl cytidine
ggccaagccctagtcctgga

SEQ ID NO: 705 - RNA, 20 nt, synthetic construct
  source 1..20: mol_type = other RNA
  modified_base 1..20: mod_base = OTHER; note = Phosphorothioate linkage
  modified_base 1..2: mod_base = OTHER; note = 2'-O-(2-methoxyethyl) ribonucleotide
  modified_base 3: mod_base = OTHER; note = locked nucleic acid
  modified_base 4: mod_base = OTHER; note = 2'-O-(2-methoxyethyl) ribonucleotide
  modified_base 5: mod_base = OTHER; note = locked nucleic acid
  modified_base 6: mod_base = OTHER; note = 2'-O-(2-methoxyethyl) ribonucleotide
  modified_base 7: mod_base = OTHER; note = locked nucleic acid
  modified_base 8: mod_base = OTHER; note = 2'-O-(2-methoxyethyl) ribonucleotide
  modified_base 9: mod_base = OTHER; note = locked nucleic acid
  modified_base 10: mod_base = OTHER; note = 2'-O-(2-methoxyethyl) ribonucleotide
  modified_base 11: mod_base = OTHER; note = locked nucleic acid
  modified_base 12: mod_base = OTHER; note = 2'-O-(2-methoxyethyl) ribonucleotide
  modified_base 13: mod_base = OTHER; note = locked nucleic acid
  modified_base 14: mod_base = OTHER; note = 2'-O-(2-methoxyethyl) ribonucleotide
  modified_base 15: mod_base = OTHER; note = locked nucleic acid
  modified_base 16: mod_base = OTHER; note = 2'-O-(2-methoxyethyl) ribonucleotide
  modified_base 17: mod_base = OTHER; note = locked nucleic acid
  modified_base 18..20: mod_base = OTHER; note = 2'-O-(2-methoxyethyl) ribonucleotide
  modified_base 3..4: mod_base = OTHER; note = 5-methyl cytidine
  modified_base 8..10: mod_base = OTHER; note = 5-methyl cytidine
  modified_base 15..16: mod_base = OTHER; note = 5-methyl cytidine
ggccaagccctagtcctgga

SEQ ID NO: 706 - RNA, 20 nt, synthetic construct
  source 1..20: mol_type = other RNA
  modified_base 1..20: mod_base = OTHER; note = Phosphorothioate linkage
  modified_base 1..2: mod_base = OTHER; note = 2'-O-(2-methoxyethyl) ribonucleotide
  modified_base 3: mod_base = OTHER; note = locked nucleic acid
  modified_base 4..5: mod_base = OTHER; note = 2'-O-(2-methoxyethyl) ribonucleotide
  modified_base 6: mod_base = OTHER; note = locked nucleic acid
  modified_base 7..8: mod_base = OTHER; note = 2'-O-(2-methoxyethyl) ribonucleotide
  modified_base 9: mod_base = OTHER; note = locked nucleic acid
  modified_base 10..11: mod_base = OTHER; note = 2'-O-(2-methoxyethyl) ribonucleotide
  modified_base 12: mod_base = OTHER; note = locked nucleic acid
  modified_base 13..14: mod_base = OTHER; note = 2'-O-(2-methoxyethyl) ribonucleotide
  modified_base 15: mod_base = OTHER; note = locked nucleic acid
  modified_base 16..17: mod_base = OTHER; note = 2'-O-(2-methoxyethyl) ribonucleotide
  modified_base 18: mod_base = OTHER; note = locked nucleic acid
  modified_base 19..20: mod_base = OTHER; note = 2'-O-(2-methoxyethyl) ribonucleotide
  modified_base 3..4: mod_base = OTHER; note = 5-methyl cytidine
  modified_base 8..10: mod_base = OTHER; note = 5-methyl cytidine
  modified_base 15..16: mod_base = OTHER; note = 5-methyl cytidine
ggccaagccctagtcctgga

SEQ ID NO: 707 - RNA, 20 nt, synthetic construct
  source 1..20: mol_type = other RNA
  modified_base 1..20: mod_base = OTHER; note = Phosphorothioate linkage
  modified_base 1..4: mod_base = OTHER; note = 2'-O-(2-methoxyethyl) ribonucleotide
  modified_base 5: mod_base = OTHER; note = locked nucleic acid
  modified_base 6..8: mod_base = OTHER; note = 2'-O-(2-methoxyethyl) ribonucleotide
  modified_base 9: mod_base = OTHER; note = locked nucleic acid
  modified_base 10..12: mod_base = OTHER; note = 2'-O-(2-methoxyethyl) ribonucleotide
  modified_base 13: mod_base = OTHER; note = locked nucleic acid
  modified_base 14..16: mod_base = OTHER; note = 2'-O-(2-methoxyethyl) ribonucleotide
  modified_base 17: mod_base = OTHER; note = locked nucleic acid
  modified_base 18..20: mod_base = OTHER; note = 2'-O-(2-methoxyethyl) ribonucleotide
  modified_base 3..4: mod_base = OTHER; note = 5-methyl cytidine
  modified_base 8..10: mod_base = OTHER; note = 5-methyl cytidine
  modified_base 15..16: mod_base = OTHER; note = 5-methyl cytidine
ggccaagccctagtcctgga

SEQ ID NO: 708 - RNA, 20 nt, synthetic construct
  source 1..20: mol_type = other RNA
  modified_base 1..20: mod_base = OTHER; note = Phosphorothioate linkage
  modified_base 1..3: mod_base = OTHER; note = 2'-O-(2-methoxyethyl) ribonucleotide
  modified_base 4: mod_base = OTHER; note = locked nucleic acid
  modified_base 5..7: mod_base = OTHER; note = 2'-O-(2-methoxyethyl) ribonucleotide
  modified_base 8: mod_base = OTHER; note = locked nucleic acid
  modified_base 9..11: mod_base = OTHER; note = 2'-O-(2-methoxyethyl) ribonucleotide
  modified_base 12: mod_base = OTHER; note = locked nucleic acid
  modified_base 13..15: mod_base = OTHER; note = 2'-O-(2-methoxyethyl) ribonucleotide
  modified_base 16: mod_base = OTHER; note = locked nucleic acid
  modified_base 17..20: mod_base = OTHER; note = 2'-O-(2-methoxyethyl) ribonucleotide
  modified_base 3..4: mod_base = OTHER; note = 5-methyl cytidine
  modified_base 8..10: mod_base = OTHER; note = 5-methyl cytidine
  modified_base 15..16: mod_base = OTHER; note = 5-methyl cytidine
ggccaagccctagtcctgga

SEQ ID NO: 709 - RNA, 20 nt, synthetic construct
  source 1..20: mol_type = other RNA
  modified_base 1..20: mod_base = OTHER; note = Phosphorothioate linkage
  modified_base 1..5: mod_base = OTHER; note = 2'-O-(2-methoxyethyl) ribonucleotide
  modified_base 6: mod_base = OTHER; note = locked nucleic acid
  modified_base 7..10: mod_base = OTHER; note = 2'-O-(2-methoxyethyl) ribonucleotide
  modified_base 11: mod_base = OTHER; note = locked nucleic acid
  modified_base 12..15: mod_base = OTHER; note = 2'-O-(2-methoxyethyl) ribonucleotide
  modified_base 16: mod_base = OTHER; note = locked nucleic acid
  modified_base 17..20: mod_base = OTHER; note = 2'-O-(2-methoxyethyl) ribonucleotide
  modified_base 3..4: mod_base = OTHER; note = 5-methyl cytidine
  modified_base 8..10: mod_base = OTHER; note = 5-methyl cytidine
  modified_base 15..16: mod_base = OTHER; note = 5-methyl cytidine
ggccaagccctagtcctgga

SEQ ID NO: 710 - RNA, 20 nt, synthetic construct
  source 1..20: mol_type = other RNA
  modified_base 1..20: mod_base = OTHER; note = Phosphorothioate linkage
  modified_base 1..4: mod_base = OTHER; note = 2'-O-(2-methoxyethyl) ribonucleotide
  modified_base 5: mod_base = OTHER; note = locked nucleic acid
  modified_base 6..9: mod_base = OTHER; note = 2'-O-(2-methoxyethyl) ribonucleotide
  modified_base 10: mod_base = OTHER; note = locked nucleic acid
  modified_base 11..14: mod_base = OTHER; note = 2'-O-(2-methoxyethyl) ribonucleotide
  modified_base 15: mod_base = OTHER; note = locked nucleic acid
  modified_base 16..20: mod_base = OTHER; note = 2'-O-(2-methoxyethyl) ribonucleotide
  modified_base 3..4: mod_base = OTHER; note = 5-methyl cytidine
  modified_base 8..10: mod_base = OTHER; note = 5-methyl cytidine
  modified_base 15..16: mod_base = OTHER; note = 5-methyl cytidine
ggccaagccctagtcctgga

SEQ ID NO: 711 - DNA, 22 bp, synthetic construct
  source 1..22: mol_type = other DNA
  modified_base 1..22: mod_base = OTHER; note = Phosphorothioate linkage
  modified_base 1..6: mod_base = OTHER; note = 2'-O-(2-methoxyethyl) ribonucleotide
  misc_feature 7..16: note = DNA
  modified_base 17..22: mod_base = OTHER; note = 2'-O-(2-methoxyethyl) ribonucleotide
  modified_base 1: mod_base = OTHER; note = 5-methyl cytidine
  modified_base 4..5: mod_base = OTHER; note = 5-methyl cytidine
  modified_base 9..11: mod_base = OTHER; note = 5-methyl cytidine
  modified_base 16..17: mod_base = OTHER; note = 5-methyl cytidine
cggccaagccctagtcctggag

SEQ ID NO: 712 - RNA, 22 nt, synthetic construct
  source 1..22: mol_type = other RNA
  modified_base 1..22: mod_base = OTHER; note = Phosphorothioate linkage
  modified_base 1..22: mod_base = OTHER; note = 2'-O-(2-methoxyethyl) ribonucleotide
  modified_base 1: mod_base = OTHER; note = 5-methyl cytidine
  modified_base 4..5: mod_base = OTHER; note = 5-methyl cytidine
  modified_base 9..11: mod_base = OTHER; note = 5-methyl cytidine
  modified_base 16..17: mod_base = OTHER; note = 5-methyl cytidine
cggccaagccctagtcctggag

SEQ ID NO: 713 - DNA, 22 bp, synthetic construct
  source 1..22: mol_type = other DNA
  modified_base 1..22: mod_base = OTHER; note = Phosphorothioate linkage
  modified_base 1..5: mod_base = OTHER; note = 2'-O-(2-methoxyethyl) ribonucleotide
  misc_feature 6..8: note = DNA
  modified_base 9: mod_base = OTHER; note = 2'-O-(2-methoxyethyl) ribonucleotide
  misc_feature 10..13: note = DNA
  modified_base 14: mod_base = OTHER; note = 2'-O-(2-methoxyethyl) ribonucleotide
  misc_feature 15..17: note = DNA
  modified_base 18..22: mod_base = OTHER; note = 2'-O-(2-methoxyethyl) ribonucleotide
  modified_base 1: mod_base = OTHER; note = 5-methyl cytidine
  modified_base 4..5: mod_base = OTHER; note = 5-methyl cytidine
  modified_base 9..11: mod_base = OTHER; note = 5-methyl cytidine
  modified_base 16..17: mod_base = OTHER; note = 5-methyl cytidine
cggccaagccctagtcctggag

SEQ ID NO: 714 - DNA, 22 bp, synthetic construct
  source 1..22: mol_type = other DNA
  modified_base 1..22: mod_base = OTHER; note = Phosphorothioate linkage
  modified_base 1..5: mod_base = OTHER; note = 2'-O-(2-methoxyethyl) ribonucleotide
  modified_base 6: mod_base = OTHER; note = locked nucleic acid
  misc_feature 7..8: note = DNA
  modified_base 9: mod_base = OTHER; note = locked nucleic acid
  misc_feature 10..13: note = DNA
  modified_base 14: mod_base = OTHER; note = locked nucleic acid
  misc_feature 15..16: note = DNA
  modified_base 17: mod_base = OTHER; note = locked nucleic acid
  modified_base 18..22: mod_base = OTHER; note = 2'-O-(2-methoxyethyl) ribonucleotide
  modified_base 1: mod_base = OTHER; note = 5-methyl cytidine
  modified_base 4..5: mod_base = OTHER; note = 5-methyl cytidine
  modified_base 9..11: mod_base = OTHER; note = 5-methyl cytidine
  modified_base 16..17: mod_base = OTHER; note = 5-methyl cytidine
cggccaagccctagtcctggag

SEQ ID NO: 715 - RNA, 22 nt, synthetic construct
  source 1..22: mol_type = other RNA
  modified_base 1..22: mod_base = OTHER; note = Phosphorothioate linkage
  modified_base 1..5: mod_base = OTHER; note = 2'-O-(2-methoxyethyl) ribonucleotide
  modified_base 6: mod_base = OTHER; note = locked nucleic acid
  modified_base 7..8: mod_base = OTHER; note = 2'-O-(2-methoxyethyl) ribonucleotide
  modified_base 9: mod_base = OTHER; note = locked nucleic acid
  modified_base 10..13: mod_base = OTHER; note = 2'-O-(2-methoxyethyl) ribonucleotide
  modified_base 14: mod_base = OTHER; note = locked nucleic acid
  modified_base 15..16: mod_base = OTHER; note = 2'-O-(2-methoxyethyl) ribonucleotide
  modified_base 17: mod_base = OTHER; note = locked nucleic acid
  modified_base 18..22: mod_base = OTHER; note = 2'-O-(2-methoxyethyl) ribonucleotide
  modified_base 1: mod_base = OTHER; note = 5-methyl cytidine
  modified_base 4..5: mod_base = OTHER; note = 5-methyl cytidine
  modified_base 9..11: mod_base = OTHER; note = 5-methyl cytidine
  modified_base 16..17: mod_base = OTHER; note = 5-methyl cytidine
cggccaagccctagtcctggag

SEQ ID NO: 716 - DNA, 24 bp, synthetic construct
  source 1..24: mol_type = other DNA
  modified_base 1..24: mod_base = OTHER; note = Phosphorothioate linkage
  modified_base 1..7: mod_base = OTHER; note = 2'-O-(2-methoxyethyl) ribonucleotide
  misc_feature 8..17: note = DNA
  modified_base 18..24: mod_base = OTHER; note = 2'-O-(2-methoxyethyl) ribonucleotide
  modified_base 2: mod_base = OTHER; note = 5-methyl cytidine
  modified_base 5..6: mod_base = OTHER; note = 5-methyl cytidine
  modified_base 10..12: mod_base = OTHER; note = 5-methyl cytidine
  modified_base 17..18: mod_base = OTHER; note = 5-methyl cytidine
  modified_base 24: mod_base = OTHER; note = 5-methyl cytidine
gcggccaagccctagtcctggagc

SEQ ID NO: 717 - RNA, 24 nt, synthetic construct
  source 1..24: mol_type = other RNA
  modified_base 1..24: mod_base = OTHER; note = Phosphorothioate linkage
  modified_base 1..24: mod_base = OTHER; note = 2'-O-(2-methoxyethyl) ribonucleotide
  modified_base 2: mod_base = OTHER; note = 5-methyl cytidine
  modified_base 5..6: mod_base = OTHER; note = 5-methyl cytidine
  modified_base 10..12: mod_base = OTHER; note = 5-methyl cytidine
  modified_base 17..18: mod_base = OTHER; note = 5-methyl cytidine
  modified_base 24: mod_base = OTHER; note = 5-methyl cytidine
gcggccaagccctagtcctggagc

SEQ ID NO: 718 - DNA, 24 bp, synthetic construct
  source 1..24: mol_type = other DNA
  modified_base 1..24: mod_base = OTHER; note = Phosphorothioate linkage
  modified_base 1..5: mod_base = OTHER; note = 2'-O-(2-methoxyethyl) ribonucleotide
  misc_feature 6..7: note = DNA
  modified_base 8: mod_base = OTHER; note = 2'-O-(2-methoxyethyl) ribonucleotide
  misc_feature 9..10: note = DNA
  modified_base 11: mod_base = OTHER; note = 2'-O-(2-methoxyethyl) ribonucleotide
  misc_feature 12..13: note = DNA
  modified_base 14: mod_base = OTHER; note = 2'-O-(2-methoxyethyl) ribonucleotide
  misc_feature 15..16: note = DNA
  modified_base 17: mod_base = OTHER; note = 2'-O-(2-methoxyethyl) ribonucleotide
  misc_feature 18..19: note = DNA
  modified_base 20..24: mod_base = OTHER; note = 2'-O-(2-methoxyethyl) ribonucleotide
  modified_base 2: mod_base = OTHER; note = 5-methyl cytidine
  modified_base 5..6: mod_base = OTHER; note = 5-methyl cytidine
  modified_base 10..12: mod_base = OTHER; note = 5-methyl cytidine
  modified_base 17..18: mod_base = OTHER; note = 5-methyl cytidine
  modified_base 24: mod_base = OTHER; note = 5-methyl cytidine
gcggccaagccctagtcctggagc

SEQ ID NO: 719 - DNA, 24 bp, synthetic construct
  source 1..24: mol_type = other DNA
  modified_base 1..24: mod_base = OTHER; note = Phosphorothioate linkage
  modified_base 1..5: mod_base = OTHER; note = 2'-O-(2-methoxyethyl) ribonucleotide
  misc_feature 6..7: note = DNA
  modified_base 8: mod_base = OTHER; note = locked nucleic acid
  misc_feature 9..10: note = DNA
  modified_base 11: mod_base = OTHER; note = locked nucleic acid
  misc_feature 12..13: note = DNA
  modified_base 14: mod_base = OTHER; note = locked nucleic acid
  misc_feature 15..16: note = DNA
  modified_base 17: mod_base = OTHER; note = locked nucleic acid
  misc_feature 18..19: note = DNA
  modified_base 20..24: mod_base = OTHER; note = 2'-O-(2-methoxyethyl) ribonucleotide
  modified_base 2: mod_base = OTHER; note = 5-methyl cytidine
  modified_base 5..6: mod_base = OTHER; note = 5-methyl cytidine
  modified_base 10..12: mod_base = OTHER; note = 5-methyl cytidine
  modified_base 17..18: mod_base = OTHER; note = 5-methyl cytidine
gcggccaagccctagtcctggagc

SEQ ID NO: 720 - RNA, 24 nt, synthetic construct
  source 1..24: mol_type = other RNA
  modified_base 1..24: mod_base = OTHER; note = Phosphorothioate linkage
  modified_base 1..7: mod_base = OTHER; note = 2'-O-(2-methoxyethyl) ribonucleotide
  modified_base 8: mod_base = OTHER; note = locked nucleic acid
  modified_base 9..10: mod_base = OTHER; note = 2'-O-(2-methoxyethyl) ribonucleotide
  modified_base 11: mod_base = OTHER; note = locked nucleic acid
  modified_base 12..13: mod_base = OTHER; note = 2'-O-(2-methoxyethyl) ribonucleotide
  modified_base 14: mod_base = OTHER; note = locked nucleic acid
  modified_base 15..16: mod_base = OTHER; note = 2'-O-(2-methoxyethyl) ribonucleotide
  modified_base 17: mod_base = OTHER; note = locked nucleic acid
  modified_base 18..22: mod_base = OTHER; note = 2'-O-(2-methoxyethyl) ribonucleotide
  modified_base 2: mod_base = OTHER; note = 5-methyl cytidine
  modified_base 5..6: mod_base = OTHER; note = 5-methyl cytidine
  modified_base 10..12: mod_base = OTHER; note = 5-methyl cytidine
  modified_base 17..18: mod_base = OTHER; note = 5-methyl cytidine
  modified_base 24: mod_base = OTHER; note = 5-methyl cytidine
gcggccaagccctagtcctggagc

SEQ ID NO: 721 - RNA, 24 nt, synthetic construct
  source 1..24: mol_type = other RNA
  modified_base 1..24: mod_base = OTHER; note = Phosphorothioate linkage
  modified_base 1..7: mod_base = OTHER; note = 2'-O-(2-methoxyethyl) ribonucleotide
  modified_base 8: mod_base = OTHER; note = locked nucleic acid
  modified_base 9..10: mod_base = OTHER; note = 2'-O-(2-methoxyethyl) ribonucleotide
  modified_base 11: mod_base = OTHER; note = locked nucleic acid
  modified_base 12..13: mod_base = OTHER; note = 2'-O-(2-methoxyethyl) ribonucleotide
  modified_base 14: mod_base = OTHER; note = locked nucleic acid
  modified_base 15..16: mod_base = OTHER; note = 2'-O-(2-methoxyethyl) ribonucleotide
  modified_base 17: mod_base = OTHER; note = locked nucleic acid
  modified_base 18..24: mod_base = OTHER; note = 2'-O-(2-methoxyethyl) ribonucleotide
  modified_base 9..10: mod_base = OTHER; note = 5-methyl cytidine
  modified_base 12: mod_base = OTHER; note = 5-methyl cytidine
  modified_base 22: mod_base = OTHER; note = 5-methyl cytidine
ggagatggcctctgggatgttctt

SEQ ID NO: 722 - RNA, 24 nt, synthetic construct
  source 1..24: mol_type = other RNA
  modified_base 1..4: mod_base = OTHER; note = Phosphorothioate linkage
  modified_base 6..19: mod_base = OTHER; note = Phosphorothioate linkage
  modified_base 21..24: mod_base = OTHER; note = Phosphorothioate linkage
  modified_base 1..7: mod_base = OTHER; note = 2'-O-(2-methoxyethyl) ribonucleotide
  modified_base 5: mod_base = OTHER; note = Phosphorothioate linkage
  modified_base 8: mod_base = OTHER; note = locked nucleic acid
  modified_base 9..10: mod_base = OTHER; note = 2'-O-(2-methoxyethyl) ribonucleotide
  modified_base 11: mod_base = OTHER; note = locked nucleic acid
  modified_base 12..13: mod_base = OTHER; note = 2'-O-(2-methoxyethyl) ribonucleotide
  modified_base 14: mod_base = OTHER; note = locked nucleic acid
  modified_base 15..16: mod_base = OTHER; note = 2'-O-(2-methoxyethyl) ribonucleotide
  modified_base 17: mod_base = OTHER; note = locked nucleic acid
  modified_base 18..24: mod_base = OTHER; note = 2'-O-(2-methoxyethyl) ribonucleotide
  modified_base 19..20: mod_base = OTHER; note = Phosphorothioate linkage
  modified_base 9..10: mod_base = OTHER; note = 5-methyl cytidine
  modified_base 12: mod_base = OTHER; note = 5-methyl cytidine
  modified_base 22: mod_base = OTHER; note = 5-methyl cytidine
ggagatggcctctgggatgttctt

SEQ ID NO: 723 - RNA, 24 nt, synthetic construct
  source 1..24: mol_type = other RNA
  modified_base 1..3: mod_base = OTHER; note = Phosphorothioate linkage
  modified_base 6..19: mod_base = OTHER; note = Phosphorothioate linkage
  modified_base 22..24: mod_base = OTHER; note = Phosphorothioate linkage
  modified_base 1..7: mod_base = OTHER; note = 2'-O-(2-methoxyethyl) ribonucleotide
  modified_base 3..5: mod_base = OTHER; note = Phosphorothioate linkage
  modified_base 8: mod_base = OTHER; note = locked nucleic acid
  modified_base 9..10: mod_base = OTHER; note = 2'-O-(2-methoxyethyl) ribonucleotide
  modified_base 11: mod_base = OTHER; note = locked nucleic acid
  modified_base 12..13: mod_base = OTHER; note = 2'-O-(2-methoxyethyl) ribonucleotide
  modified_base 14: mod_base = OTHER; note = locked nucleic acid
  modified_base 15..16: mod_base = OTHER; note = 2'-O-(2-methoxyethyl) ribonucleotide
  modified_base 17: mod_base = OTHER; note = locked nucleic acid
  modified_base 18..24: mod_base = OTHER; note = 2'-O-(2-methoxyethyl) ribonucleotide
  modified_base 19..21: mod_base = OTHER; note = Phosphorothioate linkage
  modified_base 9..10: mod_base = OTHER; note = 5-methyl cytidine
  modified_base 12: mod_base = OTHER; note = 5-methyl cytidine
  modified_base 22: mod_base = OTHER; note = 5-methyl cytidine
ggagatggcctctgggatgttctt

SEQ ID NO: 724 - RNA, 24 nt, synthetic construct
  source 1..24: mol_type = other RNA
  modified_base 1..2: mod_base = OTHER; note = Phosphorothioate linkage
  modified_base 6..19: mod_base = OTHER; note = Phosphorothioate linkage
  modified_base 23..24: mod_base = OTHER; note = Phosphorothioate linkage
  modified_base 1..7: mod_base = OTHER; note = 2'-O-(2-methoxyethyl) ribonucleotide
  modified_base 8: mod_base = OTHER; note = locked nucleic acid
  modified_base 9..10: mod_base = OTHER; note = 2'-O-(2-methoxyethyl) ribonucleotide
  modified_base 11: mod_base = OTHER; note = locked nucleic acid
  modified_base 12..13: mod_base = OTHER; note = 2'-O-(2-methoxyethyl) ribonucleotide
  modified_base 14: mod_base = OTHER; note = locked nucleic acid
  modified_base 15..16: mod_base = OTHER; note = 2'-O-(2-methoxyethyl) ribonucleotide
  modified_base 17: mod_base = OTHER; note = locked nucleic acid
  modified_base 18..24: mod_base = OTHER; note = 2'-O-(2-methoxyethyl) ribonucleotide
  modified_base 9..10: mod_base = OTHER; note = 5-methyl cytidine
  modified_base 12: mod_base = OTHER; note = 5-methyl cytidine
  modified_base 22: mod_base = OTHER; note = 5-methyl cytidine
ggagatggcctctgggatgttctt

SEQ ID NO: 725 - RNA, 24 nt, synthetic construct
  source 1..24: mol_type = other RNA
  modified_base 1..7: mod_base = OTHER; note = Phosphorothioate linkage
  modified_base 19..24: mod_base = OTHER; note = Phosphorothioate linkage
  modified_base 1..7: mod_base = OTHER; note = 2'-O-(2-methoxyethyl) ribonucleotide
  modified_base 8: mod_base = OTHER; note = locked nucleic acid
  modified_base 9..10: mod_base = OTHER; note = 2'-O-(2-methoxyethyl) ribonucleotide
  modified_base 11: mod_base = OTHER; note = locked nucleic acid
  modified_base 12..13: mod_base = OTHER; note = 2'-O-(2-methoxyethyl) ribonucleotide
  modified_base 14: mod_base = OTHER; note = locked nucleic acid
  modified_base 15..16: mod_base = OTHER; note = 2'-O-(2-methoxyethyl) ribonucleotide
  modified_base 17: mod_base = OTHER; note = locked nucleic acid
  modified_base 18..24: mod_base = OTHER; note = 2'-O-(2-methoxyethyl) ribonucleotide
  modified_base 9..10: mod_base = OTHER; note = 5-methyl cytidine
  modified_base 12: mod_base = OTHER; note = 5-methyl cytidine
  modified_base 22: mod_base = OTHER; note = 5-methyl cytidine
ggagatggcctctgggatgttctt

SEQ ID NO: 726 - RNA, 24 nt, synthetic construct
  source 1..24: mol_type = other RNA
  modified_base 1..24: mod_base = OTHER; note = Phosphorothioate linkage
  modified_base 1..5: mod_base = OTHER; note = 2'-O-(2-methoxyethyl) ribonucleotide
  modified_base 6: mod_base = OTHER; note = locked nucleic acid
  modified_base 7..8: mod_base = OTHER; note = 2'-O-(2-methoxyethyl) ribonucleotide
  modified_base 9: mod_base = OTHER; note = locked nucleic acid
  modified_base 10..11: mod_base = OTHER; note = 2'-O-(2-methoxyethyl) ribonucleotide
  modified_base 12: mod_base = OTHER; note = locked nucleic acid
  modified_base 13..14: mod_base = OTHER; note = 2'-O-(2-methoxyethyl) ribonucleotide
  modified_base 15: mod_base = OTHER; note = locked nucleic acid
  modified_base 16..17: mod_base = OTHER; note = 2'-O-(2-methoxyethyl) ribonucleotide
  modified_base 18: mod_base = OTHER; note = locked nucleic acid
  modified_base 19..24: mod_base = OTHER; note = 2'-O-(2-methoxyethyl) ribonucleotide
  modified_base 9..10: mod_base = OTHER; note = 5-methyl cytidine
  modified_base 12: mod_base = OTHER; note = 5-methyl cytidine
  modified_base 22: mod_base = OTHER; note = 5-methyl cytidine
ggagatggcctctgggatgttctt

SEQ ID NO: 727 - RNA, 24 nt, synthetic construct
  source 1..24: mol_type = other RNA
  modified_base 1..4: mod_base = OTHER; note = Phosphorothioate linkage
  modified_base 6..19: mod_base = OTHER; note = Phosphorothioate linkage
  modified_base 21..24: mod_base = OTHER; note = Phosphorothioate linkage
  modified_base 1..5: mod_base = OTHER; note = 2'-O-(2-methoxyethyl) ribonucleotide
  modified_base 6: mod_base = OTHER; note = locked nucleic acid
  modified_base 7..8: mod_base = OTHER; note = 2'-O-(2-methoxyethyl) ribonucleotide
  modified_base 9: mod_base = OTHER; note = locked nucleic acid
  modified_base 10..11: mod_base = OTHER; note = 2'-O-(2-methoxyethyl) ribonucleotide
  modified_base 12: mod_base = OTHER; note = locked nucleic acid
  modified_base 13..14: mod_base = OTHER; note = 2'-O-(2-methoxyethyl) ribonucleotide
  modified_base 15: mod_base = OTHER; note = locked nucleic acid
  modified_base 16..17: mod_base = OTHER; note = 2'-O-(2-methoxyethyl) ribonucleotide
  modified_base 18: mod_base = OTHER; note = locked nucleic acid
  modified_base 19..24: mod_base = OTHER; note = 2'-O-(2-methoxyethyl) ribonucleotide
  modified_base 9..10: mod_base = OTHER; note = 5-methyl cytidine
  modified_base 12: mod_base = OTHER; note = 5-methyl cytidine
  modified_base 22: mod_base = OTHER; note = 5-methyl cytidine
ggagatggcctctgggatgttctt

SEQ ID NO: 728 - RNA, 24 nt, synthetic construct
  source 1..24: mol_type = other RNA
  modified_base 1..3: mod_base = OTHER; note = Phosphorothioate linkage
  modified_base 6..19: mod_base = OTHER; note = Phosphorothioate linkage
  modified_base 22..23: mod_base = OTHER; note = Phosphorothioate linkage
  modified_base 1..5: mod_base = OTHER; note = 2'-O-(2-methoxyethyl) ribonucleotide
  modified_base 6: mod_base = OTHER; note = locked nucleic acid
  modified_base 7..8: mod_base = OTHER; note = 2'-O-(2-methoxyethyl) ribonucleotide
  modified_base 9: mod_base = OTHER; note = locked nucleic acid
  modified_base 10..11: mod_base = OTHER; note = 2'-O-(2-methoxyethyl) ribonucleotide
  modified_base 12: mod_base = OTHER; note = locked nucleic acid
  modified_base 13..14: mod_base = OTHER; note = 2'-O-(2-methoxyethyl) ribonucleotide
  modified_base 15: mod_base = OTHER; note = locked nucleic acid
  modified_base 16..17: mod_base = OTHER; note = 2'-O-(2-methoxyethyl) ribonucleotide
  modified_base 18: mod_base = OTHER; note = locked nucleic acid
  modified_base 19..24: mod_base = OTHER; note = 2'-O-(2-methoxyethyl) ribonucleotide
  modified_base 9..10: mod_base = OTHER; note = 5-methyl cytidine
  modified_base 12: mod_base = OTHER; note = 5-methyl cytidine
  modified_base 22: mod_base = OTHER; note = 5-methyl cytidine
ggagatggcctctgggatgttctt

SEQ ID NO: 729 - RNA, 24 nt, synthetic construct
  source 1..24: mol_type = other RNA
  modified_base 1..2: mod_base = OTHER; note = Phosphorothioate linkage
  modified_base 6..19: mod_base = OTHER; note = Phosphorothioate linkage
  modified_base 23..24: mod_base = OTHER; note = Phosphorothioate linkage
  modified_base 1..5: mod_base = OTHER; note = 2'-O-(2-methoxyethyl) ribonucleotide
  modified_base 6: mod_base = OTHER; note = locked nucleic acid
  modified_base 7..8: mod_base = OTHER; note = 2'-O-(2-methoxyethyl) ribonucleotide
  modified_base 9: mod_base = OTHER; note = locked nucleic acid
  modified_base 10..11: mod_base = OTHER; note = 2'-O-(2-methoxyethyl) ribonucleotide
  modified_base 12: mod_base = OTHER; note = locked nucleic acid
  modified_base 13..14: mod_base = OTHER; note = 2'-O-(2-methoxyethyl) ribonucleotide
  modified_base 15: mod_base = OTHER; note = locked nucleic acid
  modified_base 16..17: mod_base = OTHER; note = 2'-O-(2-methoxyethyl) ribonucleotide
  modified_base 18: mod_base = OTHER; note = locked nucleic acid
  modified_base 19..24: mod_base = OTHER; note = 2'-O-(2-methoxyethyl) ribonucleotide
  modified_base 9..10: mod_base = OTHER; note = 5-methyl cytidine
  modified_base 12: mod_base = OTHER; note = 5-methyl cytidine
  modified_base 22: mod_base = OTHER; note = 5-methyl cytidine
ggagatggcctctgggatgttctt

SEQ ID NO: 730 - RNA, 24 nt, synthetic construct
  source 1..24: mol_type = other RNA
  modified_base 1..7: mod_base = OTHER; note = Phosphorothioate linkage
  modified_base 19..24: mod_base = OTHER; note = Phosphorothioate linkage
  modified_base 1..5: mod_base = OTHER; note = 2'-O-(2-methoxyethyl) ribonucleotide
  modified_base 6: mod_base = OTHER; note = locked nucleic acid
  modified_base 7..8: mod_base = OTHER; note = 2'-O-(2-methoxyethyl) ribonucleotide
  modified_base 9: mod_base = OTHER; note = locked nucleic acid
  modified_base 10..11: mod_base = OTHER; note = 2'-O-(2-methoxyethyl) ribonucleotide
  modified_base 12: mod_base = OTHER; note = locked nucleic acid
  modified_base 13..14: mod_base = OTHER; note = 2'-O-(2-methoxyethyl) ribonucleotide
  modified_base 15: mod_base = OTHER; note = locked nucleic acid
  modified_base 16..17: mod_base = OTHER; note = 2'-O-(2-methoxyethyl) ribonucleotide
  modified_base 18: mod_base = OTHER; note = locked nucleic acid
  modified_base 19..24: mod_base = OTHER; note = 2'-O-(2-methoxyethyl) ribonucleotide
  modified_base 9..10: mod_base = OTHER; note = 5-methyl cytidine
  modified_base 12: mod_base = OTHER; note = 5-methyl cytidine
  modified_base 22: mod_base = OTHER; note = 5-methyl cytidine
ggagatggcctctgggatgttctt

SEQ ID NO: 731 - RNA, 24 nt, synthetic construct
  source 1..24: mol_type = other RNA
  modified_base 1..24: mod_base = OTHER; note = Phosphorothioate linkage
  modified_base 1..6: mod_base = OTHER; note = 2'-O-(2-methoxyethyl) ribonucleotide
  modified_base 7: mod_base = OTHER; note = locked nucleic acid
  modified_base 8..9: mod_base = OTHER; note = 2'-O-(2-methoxyethyl) ribonucleotide
  modified_base 10: mod_base = OTHER; note = locked nucleic acid
  modified_base 11..12: mod_base = OTHER; note = 2'-O-(2-methoxyethyl) ribonucleotide
  modified_base 13: mod_base = OTHER; note = locked nucleic acid
  modified_base 14..15: mod_base = OTHER; note = 2'-O-(2-methoxyethyl) ribonucleotide
  modified_base 16: mod_base = OTHER; note = locked nucleic acid
  modified_base 17..18: mod_base = OTHER; note = 2'-O-(2-methoxyethyl) ribonucleotide
  modified_base 19: mod_base = OTHER; note = locked nucleic acid
  modified_base 20..24: mod_base = OTHER; note = 2'-O-(2-methoxyethyl) ribonucleotide
  modified_base 9..10: mod_base = OTHER; note = 5-methyl cytidine
  modified_base 12: mod_base = OTHER; note = 5-methyl cytidine
  modified_base 22: mod_base = OTHER; note = 5-methyl cytidine
ggagatggcctctgggatgttctt

SEQ ID NO: 732 - RNA, 24 nt, synthetic construct
  source 1..24: mol_type = other RNA
  modified_base 1..4: mod_base = OTHER; note = Phosphorothioate linkage
  modified_base 6..19: mod_base = OTHER; note = Phosphorothioate linkage
  modified_base 21..24: mod_base = OTHER; note = Phosphorothioate linkage
  modified_base 1..6: mod_base = OTHER; note = 2'-O-(2-methoxyethyl) ribonucleotide
  modified_base 7: mod_base = OTHER; note = locked nucleic acid
  modified_base 8..9: mod_base = OTHER; note = 2'-O-(2-methoxyethyl) ribonucleotide
  modified_base 10: mod_base = OTHER; note = locked nucleic acid
  modified_base 11..12: mod_base = OTHER; note = 2'-O-(2-methoxyethyl) ribonucleotide
  modified_base 13: mod_base = OTHER; note = locked nucleic acid
  modified_base 14..15: mod_base = OTHER; note = 2'-O-(2-methoxyethyl) ribonucleotide
  modified_base 16: mod_base = OTHER; note = locked nucleic acid
  modified_base 17..18: mod_base = OTHER; note = 2'-O-(2-methoxyethyl) ribonucleotide
  modified_base 19: mod_base = OTHER; note = locked nucleic acid
  modified_base 20..24: mod_base = OTHER; note = 2'-O-(2-methoxyethyl) ribonucleotide
  modified_base 9..10: mod_base = OTHER; note = 5-methyl cytidine
  modified_base 12: mod_base = OTHER; note = 5-methyl cytidine
  modified_base 22: mod_base = OTHER; note = 5-methyl cytidine
ggagatggcctctgggatgttctt

SEQ ID NO: 733 - RNA, 24 nt, synthetic construct
  source 1..24: mol_type = other RNA
  modified_base 1..3: mod_base = OTHER; note = Phosphorothioate linkage
  modified_base 6..19: mod_base = OTHER; note = Phosphorothioate linkage
  modified_base 22..24: mod_base = OTHER; note = Phosphorothioate linkage
  modified_base 1..6: mod_base = OTHER; note = 2'-O-(2-methoxyethyl) ribonucleotide
  modified_base 7: mod_base = OTHER; note = locked nucleic acid
  modified_base 8..9: mod_base = OTHER; note = 2'-O-(2-methoxyethyl) ribonucleotide
  modified_base 10: mod_base = OTHER; note = locked nucleic acid
  modified_base 11..12: mod_base = OTHER; note = 2'-O-(2-methoxyethyl) ribonucleotide
  modified_base 13: mod_base = OTHER; note = locked nucleic acid
  modified_base 14..15: mod_base = OTHER; note = 2'-O-(2-methoxyethyl) ribonucleotide
  modified_base 16: mod_base = OTHER; note = locked nucleic acid
  modified_base 17..18: mod_base = OTHER; note = 2'-O-(2-methoxyethyl) ribonucleotide
  modified_base 19: mod_base = OTHER; note = locked nucleic acid
  modified_base 20..24: mod_base = OTHER; note = 2'-O-(2-methoxyethyl) ribonucleotide
  modified_base 9..10: mod_base = OTHER; note = 5-methyl cytidine
  modified_base 12: mod_base = OTHER; note = 5-methyl cytidine
  modified_base 22: mod_base = OTHER; note = 5-methyl cytidine
ggagatggcctctgggatgttctt

SEQ ID NO: 734 - RNA, 24 nt, synthetic construct
  source 1..24: mol_type = other RNA
  modified_base 1..2: mod_base = OTHER; note = Phosphorothioate linkage
  modified_base 6..19: mod_base = OTHER; note = Phosphorothioate linkage
  modified_base 23..24: mod_base = OTHER; note = Phosphorothioate linkage
  modified_base 1..6: mod_base = OTHER; note = 2'-O-(2-methoxyethyl) ribonucleotide
  modified_base 7: mod_base = OTHER; note = locked nucleic acid
  modified_base 8..9: mod_base = OTHER; note = 2'-O-(2-methoxyethyl) ribonucleotide
  modified_base 10: mod_base = OTHER; note = locked nucleic acid
  modified_base 11..12: mod_base = OTHER; note = 2'-O-(2-methoxyethyl) ribonucleotide
  modified_base 13: mod_base = OTHER; note = locked nucleic acid
  modified_base 14..15: mod_base = OTHER; note = 2'-O-(2-methoxyethyl) ribonucleotide
  modified_base 16: mod_base = OTHER; note = locked nucleic acid
  modified_base 17..18: mod_base = OTHER; note = 2'-O-(2-methoxyethyl) ribonucleotide
  modified_base 19: mod_base = OTHER; note = locked nucleic acid
  modified_base 20..24: mod_base = OTHER; note = 2'-O-(2-methoxyethyl) ribonucleotide
  modified_base 9..10: mod_base = OTHER; note = 5-methyl cytidine
  modified_base 12: mod_base = OTHER; note = 5-methyl cytidine
  modified_base 22: mod_base = OTHER; note = 5-methyl cytidine
ggagatggcctctgggatgttctt

SEQ ID NO: 735 - RNA, 24 nt, synthetic construct
  source 1..24: mol_type = other RNA
  modified_base 1..7: mod_base = OTHER; note = Phosphorothioate linkage
  modified_base 19..24: mod_base = OTHER; note = Phosphorothioate linkage
  modified_base 1..6: mod_base = OTHER; note = 2'-O-(2-methoxyethyl) ribonucleotide
  modified_base 7: mod_base = OTHER; note = locked nucleic acid
  modified_base 8..9: mod_base = OTHER; note = 2'-O-(2-methoxyethyl) ribonucleotide
  modified_base 10: mod_base = OTHER; note = locked nucleic acid
  modified_base 11..12: mod_base = OTHER; note = 2'-O-(2-methoxyethyl) ribonucleotide
  modified_base 13: mod_base = OTHER; note = locked nucleic acid
  modified_base 14..15: mod_base = OTHER; note = 2'-O-(2-methoxyethyl) ribonucleotide
  modified_base 16: mod_base = OTHER; note = locked nucleic acid
  modified_base 17..18: mod_base = OTHER; note = 2'-O-(2-methoxyethyl) ribonucleotide
  modified_base 19: mod_base = OTHER; note = locked nucleic acid
  modified_base 20..24: mod_base = OTHER; note = 2'-O-(2-methoxyethyl) ribonucleotide
  modified_base 9..10: mod_base = OTHER; note = 5-methyl cytidine
  modified_base 12: mod_base = OTHER; note = 5-methyl cytidine
  modified_base 22: mod_base = OTHER; note = 5-methyl cytidine
ggagatggcctctgggatgttctt

SEQ ID NO: 736 - DNA, 20 bp, synthetic construct
  source 1..20: mol_type = other DNA
  modified_base 1..20: mod_base = OTHER; note = Phosphorothioate linkage
  modified_base 1..5: mod_base = OTHER; note = 2'-O-(2-methoxyethyl) ribonucleotide
  misc_feature 6..15: note = DNA
  modified_base 16..20: mod_base = OTHER; note = 2'-O-(2-methoxyethyl) ribonucleotide
  modified_base 4: mod_base = OTHER; note = 5-methyl cytidine
  modified_base 6: mod_base = OTHER; note = 5-methyl cytidine
  modified_base 10: mod_base = OTHER; note = 5-methyl cytidine
  modified_base 13..15: mod_base = OTHER; note = 5-methyl cytidine
  modified_base 17..18: mod_base = OTHER; note = 5-methyl cytidine
tggcacttgcaaccctccta

SEQ ID NO: 737 - DNA, 20 bp, synthetic construct
  source 1..20: mol_type = other DNA
  modified_base 1..20: mod_base = OTHER; note = Phosphorothioate linkage
  modified_base 1..5: mod_base = OTHER; note = 2'-O-(2-methoxyethyl) ribonucleotide
  misc_feature 6..15: note = DNA
  modified_base 16..20: mod_base = OTHER; note = 2'-O-(2-methoxyethyl) ribonucleotide
  modified_base 3: mod_base = OTHER; note = 5-methyl cytidine
  modified_base 8..9: mod_base = OTHER; note = 5-methyl cytidine
  modified_base 12: mod_base = OTHER; note = 5-methyl cytidine
  modified_base 20: mod_base = OTHER; note = 5-methyl cytidine
ggcagatccttctatgtagc

SEQ ID NO: 738 - DNA, 20 bp, synthetic construct
  source 1..20: mol_type = other DNA
  modified_base 1..20: mod_base = OTHER; note = Phosphorothioate linkage
  modified_base 1..5: mod_base = OTHER; note = 2'-O-(2-methoxyethyl) ribonucleotide
  misc_feature 6..15: note = DNA
  modified_base 16..20: mod_base = OTHER; note = 2'-O-(2-methoxyethyl) ribonucleotide
  modified_base 9: mod_base = OTHER; note = 5-methyl cytidine
gggatgttctttgaattagg

SEQ ID NO: 739 - DNA, 20 bp, synthetic construct
  source 1..20: mol_type = other DNA
  modified_base 1..20: mod_base = OTHER; note = Phosphorothioate linkage
  modified_base 1..5: mod_base = OTHER; note = 2'-O-(2-methoxyethyl) ribonucleotide
  misc_feature 6..15: note = DNA
  modified_base 16..20: mod_base = OTHER; note = 2'-O-(2-methoxyethyl) ribonucleotide
  modified_base 1..2: mod_base = OTHER; note = 5-methyl cytidine
  modified_base 14: mod_base = OTHER; note = 5-methyl cytidine
  modified_base 20: mod_base = OTHER; note = 5-methyl cytidine
ccgttgagaggaactgggtc

SEQ ID NO: 740 - DNA, 20 bp, synthetic construct
  source 1..20: mol_type = other DNA
  modified_base 1..20: mod_base = OTHER; note = Phosphorothioate linkage
  modified_base 1..5: mod_base = OTHER; note = 2'-O-(2-methoxyethyl) ribonucleotide
  misc_feature 6..15: note = DNA
  modified_base 16..20: mod_base = OTHER; note = 2'-O-(2-methoxyethyl) ribonucleotide
  modified_base 18..19: mod_base = OTHER; note = 5-methyl cytidine
gtgtagtgtagaggtggcca

SEQ ID NO: 741 - DNA, 20 bp, synthetic construct
  source 1..20: mol_type = other DNA
  modified_base 1..20: mod_base = OTHER; note = Phosphorothioate linkage
  modified_base 1..5: mod_base = OTHER; note = 2'-O-(2-methoxyethyl) ribonucleotide
  misc_feature 6..15: note = DNA
  modified_base 16..20: mod_base = OTHER; note = 2'-O-(2-methoxyethyl) ribonucleotide
  modified_base 5: mod_base = OTHER; note = 5-methyl cytidine
  modified_base 7..8: mod_base = OTHER; note = 5-methyl cytidine
  modified_base 13: mod_base = OTHER; note = 5-methyl cytidine
  modified_base 15..17: mod_base = OTHER; note = 5-methyl cytidine
aaggctccagttctccctag

SEQ ID NO: 742 - DNA, 20 bp, synthetic construct
  source 1..20: mol_type = other DNA
  modified_base 1..20: mod_base = OTHER; note = Phosphorothioate linkage
  modified_base 1..5: mod_base = OTHER; note = 2'-O-(2-methoxyethyl) ribonucleotide
  misc_feature 6..15: note = DNA
  modified_base 16..20: mod_base = OTHER; note = 2'-O-(2-methoxyethyl) ribonucleotide
  modified_base 14: mod_base = OTHER; note = 5-methyl cytidine
  modified_base 19: mod_base = OTHER; note = 5-methyl cytidine
tagtggaagatgtcggagct

SEQ ID NO: 743 - DNA, 20 bp, synthetic construct
  source 1..20: mol_type = other DNA
  modified_base 1..20: mod_base = OTHER; note = Phosphorothioate linkage
  modified_base 1..5: mod_base = OTHER; note = 2'-O-(2-methoxyethyl) ribonucleotide
  misc_feature 6..15: note = DNA
  modified_base 16..20: mod_base = OTHER; note = 2'-O-(2-methoxyethyl) ribonucleotide
  modified_base 1: mod_base = OTHER; note = 5-methyl cytidine
  modified_base 6..9: mod_base = OTHER; note = 5-methyl cytidine
  modified_base 11: mod_base = OTHER; note = 5-methyl cytidine
  modified_base 14: mod_base = OTHER; note = 5-methyl cytidine
  modified_base 16: mod_base = OTHER; note = 5-methyl cytidine
  modified_base 18: mod_base = OTHER; note = 5-methyl cytidine
catttcccctcgacactcag

SEQ ID NO: 744 - DNA, 20 bp, synthetic construct
  source 1..20: mol_type = other DNA
  modified_base 1..20: mod_base = OTHER; note = Phosphorothioate linkage
  modified_base 1..5: mod_base = OTHER; note = 2'-O-(2-methoxyethyl) ribonucleotide
  misc_feature 6..15: note = DNA
  modified_base 16..20: mod_base = OTHER; note = 2'-O-(2-methoxyethyl) ribonucleotide
  modified_base 1: mod_base = OTHER; note = 5-methyl cytidine
  modified_base 4: mod_base = OTHER; note = 5-methyl cytidine
  modified_base 13: mod_base = OTHER; note = 5-methyl cytidine
  modified_base 15: mod_base = OTHER; note = 5-methyl cytidine
  modified_base 17..18: mod_base = OTHER; note = 5-methyl cytidine
catctggattggctcacctt

SEQ ID NO: 745 - DNA, 20 bp, synthetic construct
  source 1..20: mol_type = other DNA
  modified_base 1..20: mod_base = OTHER; note = Phosphorothioate linkage
  modified_base 1..5: mod_base = OTHER; note = 2'-O-(2-methoxyethyl) ribonucleotide
  misc_feature 6..15: note = DNA
  modified_base 16..20: mod_base = OTHER; note = 2'-O-(2-methoxyethyl) ribonucleotide
  modified_base 2: mod_base = OTHER; note = 5-methyl cytidine
  modified_base 7..11: mod_base = OTHER; note = 5-methyl cytidine
  modified_base 13: mod_base = OTHER; note = 5-methyl cytidine
  modified_base 16..17: mod_base = OTHER; note = 5-methyl cytidine
  modified_base 19: mod_base = OTHER; note = 5-methyl cytidine
acttttcccccgctgcctct

SEQ ID NO: 746 - DNA, 20 bp, synthetic construct
  source 1..20: mol_type = other DNA
  modified_base 1..20: mod_base = OTHER; note = Phosphorothioate linkage
  modified_base 1..5: mod_base = OTHER; note = 2'-O-(2-methoxyethyl) ribonucleotide
  misc_feature 6..15: note = DNA
  modified_base 16..20: mod_base = OTHER; note = 2'-O-(2-methoxyethyl) ribonucleotide
  modified_base 3: mod_base = OTHER; note = 5-methyl cytidine
  modified_base 11: mod_base = OTHER; note = 5-methyl cytidine
  modified_base 17..19: mod_base = OTHER; note = 5-methyl cytidine
ggcgtgatggctgagtccct

SEQ ID NO: 747 - DNA, 20 bp, synthetic construct
  source 1..20: mol_type = other DNA
  modified_base 1..20: mod_base = OTHER; note = Phosphorothioate linkage
  modified_base 1..5: mod_base = OTHER; note = 2'-O-(2-methoxyethyl) ribonucleotide
  misc_feature 6..15: note = DNA
  modified_base 16..20: mod_base = OTHER; note = 2'-O-(2-methoxyethyl) ribonucleotide
  modified_base 1: mod_base = OTHER; note = 5-methyl cytidine
  modified_base 3: mod_base = OTHER; note = 5-methyl cytidine
  modified_base 7: mod_base = OTHER; note = 5-methyl cytidine
  modified_base 11: mod_base = OTHER; note = 5-methyl cytidine
  modified_base 13: mod_base = OTHER; note = 5-methyl cytidine
  modified_base 16: mod_base = OTHER; note = 5-methyl cytidine
ctctttcggacgctgcaagt

SEQ ID NO: 748 - DNA, 20 bp, synthetic construct
  source 1..20: mol_type = other DNA
  modified_base 1..20: mod_base = OTHER; note = Phosphorothioate linkage
  modified_base 1..5: mod_base = OTHER; note = 2'-O-(2-methoxyethyl) ribonucleotide
  misc_feature 6..15: note = DNA
  modified_base 16..20: mod_base = OTHER; note = 2'-O-(2-methoxyethyl) ribonucleotide
  modified_base 3: mod_base = OTHER; note = 5-methyl cytidine
  modified_base 5..6: mod_base = OTHER; note = 5-methyl cytidine
  modified_base 11..12: mod_base = OTHER; note = 5-methyl cytidine
  modified_base 15: mod_base = OTHER; note = 5-methyl cytidine
  modified_base 17: mod_base = OTHER; note = 5-methyl cytidine
gtctccaggtccggctcttt

SEQ ID NO: 749 - DNA, 20 bp, synthetic construct
  source 1..20: mol_type = other DNA
  modified_base 1..20: mod_base = OTHER; note = Phosphorothioate linkage
  modified_base 1..5: mod_base = OTHER; note = 2'-O-(2-methoxyethyl) ribonucleotide
  misc_feature 6..15: note = DNA
  modified_base 16..20: mod_base = OTHER; note = 2'-O-(2-methoxyethyl) ribonucleotide
  modified_base 2: mod_base = OTHER; note = 5-methyl cytidine
  modified_base 4..5: mod_base = OTHER; note = 5-methyl cytidine
  modified_base 7: mod_base = OTHER; note = 5-methyl cytidine
  modified_base 9: mod_base = OTHER; note = 5-methyl cytidine
  modified_base 14..15: mod_base = OTHER; note = 5-methyl cytidine
  modified_base 19: mod_base = OTHER; note = 5-methyl cytidine
gctcctctcttgtccgtact

SEQ ID NO: 750 - DNA, 20 bp, synthetic construct
  source 1..20: mol_type = other DNA
  modified_base 1..20: mod_base = OTHER; note = Phosphorothioate linkage
  modified_base 1..5: mod_base = OTHER; note = 2'-O-(2-methoxyethyl) ribonucleotide
  misc_feature 6..15: note = DNA
  modified_base 16..20: mod_base = OTHER; note = 2'-O-(2-methoxyethyl) ribonucleotide
  modified_base 3: mod_base = OTHER; note = 5-methyl cytidine
  modified_base 5: mod_base = OTHER; note = 5-methyl cytidine
  modified_base 9..11: mod_base = OTHER; note = 5-methyl cytidine
  modified_base 14: mod_base = OTHER; note = 5-methyl cytidine
  modified_base 19: mod_base = OTHER; note = 5-methyl cytidine
ttctcttgcccagcatgtcg

SEQ ID NO: 751 - DNA, 20 bp, synthetic construct
  source 1..20: mol_type = other DNA
  modified_base 1..20: mod_base = OTHER; note = Phosphorothioate linkage
  modified_base 1..5: mod_base = OTHER; note = 2'-O-(2-methoxyethyl) ribonucleotide
  misc_feature 6..15: note = DNA
  modified_base 16..20: mod_base = OTHER; note = 2'-O-(2-methoxyethyl) ribonucleotide
  modified_base 8: mod_base = OTHER; note = 5-methyl cytidine
  modified_base 10..11: mod_base = OTHER; note = 5-methyl cytidine
  modified_base 13..16: mod_base = OTHER; note = 5-methyl cytidine
  modified_base 18: mod_base = OTHER; note = 5-methyl cytidine
  modified_base 20: mod_base = OTHER; note = 5-methyl cytidine
gtagagacacctccccgcac

SEQ ID NO: 752 - DNA, 20 bp, synthetic construct
  source 1..20: mol_type = other DNA
  modified_base 1..20: mod_base = OTHER; note = Phosphorothioate linkage
  modified_base 1..5: mod_base = OTHER; note = 2'-O-(2-methoxyethyl) ribonucleotide
  misc_feature 6..15: note = DNA
  modified_base 16..20: mod_base = OTHER; note = 2'-O-(2-methoxyethyl) ribonucleotide
  modified_base 1: mod_base = OTHER; note = 5-methyl cytidine
  modified_base 7: mod_base = OTHER; note = 5-methyl cytidine
  modified_base 9: mod_base = OTHER; note = 5-methyl cytidine
  modified_base 13: mod_base = OTHER; note = 5-methyl cytidine
ctgatgcactaacgaggttg

SEQ ID NO: 753 - DNA, 20 bp, synthetic construct
  source 1..20: mol_type = other DNA
  modified_base 1..20: mod_base = OTHER; note = Phosphorothioate linkage
  modified_base 1..5: mod_base = OTHER; note = 2'-O-(2-methoxyethyl) ribonucleotide
  misc_feature 6..15: note = DNA
  modified_base 16..20: mod_base = OTHER; note = 2'-O-(2-methoxyethyl) ribonucleotide
  modified_base 2: mod_base = OTHER; note = 5-methyl cytidine
  modified_base 6: mod_base = OTHER; note = 5-methyl cytidine
  modified_base 8..11: mod_base = OTHER; note = 5-methyl cytidine
  modified_base 14: mod_base = OTHER; note = 5-methyl cytidine
  modified_base 17: mod_base = OTHER; note = 5-methyl cytidine
acaatctccccggctactgt

SEQ ID NO: 754 - DNA, 20 bp, synthetic construct
  source 1..20: mol_type = other DNA
  modified_base 1..20: mod_base = OTHER; note = Phosphorothioate linkage
  modified_base 1..5: mod_base = OTHER; note = 2'-O-(2-methoxyethyl) ribonucleotide
  misc_feature 6..15: note = DNA
  modified_base 16..20: mod_base = OTHER; note = 2'-O-(2-methoxyethyl) ribonucleotide
  modified_base 5..7: mod_base = OTHER; note = 5-methyl cytidine
  modified_base 13: mod_base = OTHER; note = 5-methyl cytidine
  modified_base 15..16: mod_base = OTHER; note = 5-methyl cytidine
  modified_base 20: mod_base = OTHER; note = 5-methyl cytidine
gaagccctggatctccgagc

SEQ ID NO: 755 - DNA, 20 bp, synthetic construct
  source 1..20: mol_type = other DNA
  modified_base 1..20: mod_base = OTHER; note = Phosphorothioate linkage
  modified_base 1..5: mod_base = OTHER; note = 2'-O-(2-methoxyethyl) ribonucleotide
  misc_feature 6..15: note = DNA
  modified_base 16..20: mod_base = OTHER; note = 2'-O-(2-methoxyethyl) ribonucleotide
  modified_base 1..3: mod_base = OTHER; note = 5-methyl cytidine
  modified_base 5..6: mod_base = OTHER; note = 5-methyl cytidine
  modified_base 8: mod_base = OTHER; note = 5-methyl cytidine
  modified_base 11: mod_base = OTHER; note = 5-methyl cytidine
  modified_base 17: mod_base = OTHER; note = 5-methyl cytidine
cccgcctctacgtagacaag

SEQ ID NO: 756 - DNA, 20 bp, synthetic construct
  source 1..20: mol_type = other DNA
  modified_base 1..20: mod_base = OTHER; note = Phosphorothioate linkage
  modified_base 1..5: mod_base = OTHER; note = 2'-O-(2-methoxyethyl) ribonucleotide
  misc_feature 6..15: note = DNA
  modified_base 16..20: mod_base = OTHER; note = 2'-O-(2-methoxyethyl) ribonucleotide
  modified_base 14: mod_base = OTHER; note = 5-methyl cytidine
ggaggaatgtgaactgagta

SEQ ID NO: 757 - DNA, 20 bp, synthetic construct
  source 1..20: mol_type = other DNA
  modified_base 1..20: mod_base = OTHER; note = Phosphorothioate linkage
  modified_base 1..5: mod_base = OTHER; note = 2'-O-(2-methoxyethyl) ribonucleotide
  misc_feature 6..15: note = DNA
  modified_base 16..20: mod_base = OTHER; note = 2'-O-(2-methoxyethyl) ribonucleotide
  modified_base 1: mod_base = OTHER; note = 5-methyl cytidine
  modified_base 4: mod_base = OTHER; note = 5-methyl cytidine
  modified_base 7: mod_base = OTHER; note = 5-methyl cytidine
  modified_base 9: mod_base = OTHER; note = 5-methyl cytidine
  modified_base 11: mod_base = OTHER; note = 5-methyl cytidine
  modified_base 14..15: mod_base = OTHER; note = 5-methyl cytidine
  modified_base 17..18: mod_base = OTHER; note = 5-methyl cytidine
ctgcaacactctgccgccag

SEQ ID NO: 758 - DNA, 20 bp, synthetic construct
  source 1..20: mol_type = other DNA
  modified_base 1..20: mod_base = OTHER; note = Phosphorothioate linkage
  modified_base 1..5: mod_base = OTHER; note = 2'-O-(2-methoxyethyl) ribonucleotide
  misc_feature 6..15: note = DNA
  modified_base 16..20: mod_base = OTHER; note = 2'-O-(2-methoxyethyl) ribonucleotide
  modified_base 1..2: mod_base = OTHER; note = 5-methyl cytidine
  modified_base 4..5: mod_base = OTHER; note = 5-methyl cytidine
  modified_base 12: mod_base = OTHER; note = 5-methyl cytidine
  modified_base 15..16: mod_base = OTHER; note = 5-methyl cytidine
cctccagtaaacgaccttga

SEQ ID NO: 759 - DNA, 20 bp, synthetic construct
  source 1..20: mol_type = other DNA
  modified_base 1..20: mod_base = OTHER; note = Phosphorothioate linkage
  modified_base 1..5: mod_base = OTHER; note = 2'-O-(2-methoxyethyl) ribonucleotide
  misc_feature 6..15: note = DNA
  modified_base 16..20: mod_base = OTHER; note = 2'-O-(2-methoxyethyl) ribonucleotide
  modified_base 5..7: mod_base = OTHER; note = 5-methyl cytidine
  modified_base 11..12: mod_base = OTHER; note = 5-methyl cytidine
  modified_base 18: mod_base = OTHER; note = 5-methyl cytidine
aagtcccgatccagaagcag

SEQ ID NO: 760 - DNA, 20 bp, synthetic construct
  source 1..20: mol_type = other DNA
  modified_base 1..20: mod_base = OTHER; note = Phosphorothioate linkage
  modified_base 1..5: mod_base = OTHER; note = 2'-O-(2-methoxyethyl) ribonucleotide
  misc_feature 6..15: note = DNA
  modified_base 16..20: mod_base = OTHER; note = 2'-O-(2-methoxyethyl) ribonucleotide
  modified_base 2: mod_base = OTHER; note = 5-methyl cytidine
  modified_base 5..6: mod_base = OTHER; note = 5-methyl cytidine
  modified_base 10: mod_base = OTHER; note = 5-methyl cytidine
  modified_base 20: mod_base = OTHER; note = 5-methyl cytidine
tctgccaggcgtgaagagac

SEQ ID NO: 761 - DNA, 20 bp, synthetic construct
  source 1..20: mol_type = other DNA
  modified_base 1..20: mod_base = OTHER; note = Phosphorothioate linkage
  modified_base 1..5: mod_base = OTHER; note = 2'-O-(2-methoxyethyl) ribonucleotide
  misc_feature 6..15: note = DNA
  modified_base 16..20: mod_base = OTHER; note = 2'-O-(2-methoxyethyl) ribonucleotide
  modified_base 3: mod_base = OTHER; note = 5-methyl cytidine
  modified_base 6..7: mod_base = OTHER; note = 5-methyl cytidine
  modified_base 10: mod_base = OTHER; note = 5-methyl cytidine
  modified_base 17: mod_base = OTHER; note = 5-methyl cytidine
atcttccaactggtttcgag

SEQ ID NO: 762 - DNA, 20 bp, synthetic construct
  source 1..20: mol_type = other DNA
  modified_base 1..20: mod_base = OTHER; note = Phosphorothioate linkage
  modified_base 1..5: mod_base = OTHER; note = 2'-O-(2-methoxyethyl) ribonucleotide
  misc_feature 6..15: note = DNA
  modified_base 16..20: mod_base = OTHER; note = 2'-O-(2-methoxyethyl) ribonucleotide
  modified_base 5: mod_base = OTHER; note = 5-methyl cytidine
  modified_base 10..11: mod_base = OTHER; note = 5-methyl cytidine
  modified_base 13: mod_base = OTHER; note = 5-methyl cytidine
  modified_base 15: mod_base = OTHER; note = 5-methyl cytidine
  modified_base 17..19: mod_base = OTHER; note = 5-methyl cytidine
tagtctaagccactctcccc

SEQ ID NO: 763 - DNA, 20 bp, synthetic construct
  source 1..20: mol_type = other DNA
  modified_base 1..20: mod_base = OTHER; note = Phosphorothioate linkage
  modified_base 1..5: mod_base = OTHER; note = 2'-O-(2-methoxyethyl) ribonucleotide
  misc_feature 6..15: note = DNA
  modified_base 16..20: mod_base = OTHER; note = 2'-O-(2-methoxyethyl) ribonucleotide
  modified_base 2: mod_base = OTHER; note = 5-methyl cytidine
  modified_base 5: mod_base = OTHER; note = 5-methyl cytidine
  modified_base 8: mod_base = OTHER; note = 5-methyl cytidine
  modified_base 13..15: mod_base = OTHER; note = 5-methyl cytidine
  modified_base 20: mod_base = OTHER; note = 5-methyl cytidine
acatctacagtgcccggtac

SEQ ID NO: 764 - DNA, 20 bp, synthetic construct
  source 1..20: mol_type = other DNA
  modified_base 1..20: mod_base = OTHER; note = Phosphorothioate linkage
  modified_base 1..5: mod_base = OTHER; note = 2'-O-(2-methoxyethyl) ribonucleotide
  misc_feature 6..15: note = DNA
  modified_base 16..20: mod_base = OTHER; note = 2'-O-(2-methoxyethyl) ribonucleotide
  modified_base 2: mod_base = OTHER; note = 5-methyl cytidine
  modified_base 5..10: mod_base = OTHER; note = 5-methyl cytidine
  modified_base 19..20: mod_base = OTHER; note = 5-methyl cytidine
tcttccccccagtttgagcc

SEQ ID NO: 765 - DNA, 20 bp, synthetic construct
  source 1..20: mol_type = other DNA
  modified_base 1..20: mod_base = OTHER; note = Phosphorothioate linkage
  modified_base 1..5: mod_base = OTHER; note = 2'-O-(2-methoxyethyl) ribonucleotide
  misc_feature 6..15: note = DNA
  modified_base 16..20: mod_base = OTHER; note = 2'-O-(2-methoxyethyl) ribonucleotide
  modified_base 2: mod_base = OTHER; note = 5-methyl cytidine
  modified_base 7: mod_base = OTHER; note = 5-methyl cytidine
  modified_base 11: mod_base = OTHER; note = 5-methyl cytidine
gcagtgctatcaatatggat

SEQ ID NO: 766 - DNA, 20 bp, synthetic construct
  source 1..20: mol_type = other DNA
  modified_base 1..20: mod_base = OTHER; note = Phosphorothioate linkage
  modified_base 1..5: mod_base = OTHER; note = 2'-O-(2-methoxyethyl) ribonucleotide
  misc_feature 6..15: note = DNA
  modified_base 16..20: mod_base = OTHER; note = 2'-O-(2-methoxyethyl) ribonucleotide
  modified_base 4..6: mod_base = OTHER; note = 5-methyl cytidine
  modified_base 8..9: mod_base = OTHER; note = 5-methyl cytidine
  modified_base 14: mod_base = OTHER; note = 5-methyl cytidine
  modified_base 17..18: mod_base = OTHER; note = 5-methyl cytidine
  modified_base 20: mod_base = OTHER; note = 5-methyl cytidine
tgtcccaccttatcagcctc

SEQ ID NO: 767 - DNA, 20 bp, synthetic construct
  source 1..20: mol_type = other DNA
  modified_base 1..20: mod_base = OTHER; note = Phosphorothioate linkage
  modified_base 1..5: mod_base = OTHER; note = 2'-O-(2-methoxyethyl) ribonucleotide
  misc_feature 6..15: note = DNA
  modified_base 16..20: mod_base = OTHER; note = 2'-O-(2-methoxyethyl) ribonucleotide
  modified_base 2..3: mod_base = OTHER; note = 5-methyl cytidine
  modified_base 7: mod_base = OTHER; note = 5-methyl cytidine
  modified_base 14: mod_base = OTHER; note = 5-methyl cytidine
  modified_base 18: mod_base = OTHER; note = 5-methyl cytidine
cccttgctagaggctgtctg

SEQ ID NO: 768 - DNA, 20 bp, synthetic construct
  source 1..20: mol_type = other DNA
  modified_base 1..20: mod_base = OTHER; note = Phosphorothioate linkage
  modified_base 1..5: mod_base = OTHER; note = 2'-O-(2-methoxyethyl) ribonucleotide
  misc_feature 6..15: note = DNA
  modified_base 16..20: mod_base = OTHER; note = 2'-O-(2-methoxyethyl) ribonucleotide
  modified_base 3: mod_base = OTHER; note = 5-methyl cytidine
  modified_base 2..4: mod_base = OTHER; note = 5-methyl cytidine
  modified_base 9: mod_base = OTHER; note = 5-methyl cytidine
  modified_base 15: mod_base = OTHER; note = 5-methyl cytidine
  modified_base 20: mod_base = OTHER; note = 5-methyl cytidine
gcccttatcttgaacgtggc

SEQ ID NO: 769 - DNA, 20 bp, synthetic construct
  source 1..20: mol_type = other DNA
  modified_base 1..20: mod_base = OTHER; note = Phosphorothioate linkage
  modified_base 1..5: mod_base = OTHER; note = 2'-O-(2-methoxyethyl) ribonucleotide
  misc_feature 6..15: note = DNA
  modified_base 16..20: mod_base = OTHER; note = 2'-O-(2-methoxyethyl) ribonucleotide
  modified_base 2..3: mod_base = OTHER; note = 5-methyl cytidine
  modified_base 6: mod_base = OTHER; note = 5-methyl cytidine
  modified_base 8: mod_base = OTHER; note = 5-methyl cytidine
  modified_base 11: mod_base = OTHER; note = 5-methyl cytidine
  modified_base 14..15: mod_base = OTHER; note = 5-methyl cytidine
  modified_base 17..18: mod_base = OTHER; note = 5-methyl cytidine
tccatctcgacagccaccag

SEQ ID NO: 770 - DNA, 20 bp, synthetic construct
  source 1..20: mol_type = other DNA
  modified_base 1..20: mod_base = OTHER; note = Phosphorothioate linkage
  modified_base 1..5: mod_base = OTHER; note = 2'-O-(2-methoxyethyl) ribonucleotide
  misc_feature 6..15: note = DNA
  modified_base 16..20: mod_base = OTHER; note = 2'-O-(2-methoxyethyl) ribonucleotide
  modified_base 1..2: mod_base = OTHER; note = 5-methyl cytidine
  modified_base 8: mod_base = OTHER; note = 5-methyl cytidine
  modified_base 10: mod_base = OTHER; note = 5-methyl cytidine
  modified_base 15: mod_base = OTHER; note = 5-methyl cytidine
  modified_base 17..19: mod_base = OTHER; note = 5-methyl cytidine
ccatggtctctattcaccca

SEQ ID NO: 771 - DNA, 20 bp, synthetic construct
  source 1..20: mol_type = other DNA
  modified_base 1..20: mod_base = OTHER; note = Phosphorothioate linkage
  modified_base 1..5: mod_base = OTHER; note = 2'-O-(2-methoxyethyl) ribonucleotide
  misc_feature 6..15: note = DNA
  modified_base 16..20: mod_base = OTHER; note = 2'-O-(2-methoxyethyl) ribonucleotide
  modified_base 2: mod_base = OTHER; note = 5-methyl cytidine
  modified_base 6..7: mod_base = OTHER; note = 5-methyl cytidine
  modified_base 12: mod_base = OTHER; note = 5-methyl cytidine
  modified_base 20: mod_base = OTHER; note = 5-methyl cytidine
actgtcctgaactgtatggc

SEQ ID NO: 772 - DNA, 20 bp, synthetic construct
  source 1..20: mol_type = other DNA
  modified_base 1..20: mod_base = OTHER; note = Phosphorothioate linkage
  modified_base 1..5: mod_base = OTHER; note = 2'-O-(2-methoxyethyl) ribonucleotide
  misc_feature 6..15: note = DNA
  modified_base 16..20: mod_base = OTHER; note = 2'-O-(2-methoxyethyl) ribonucleotide
  modified_base 1: mod_base = OTHER; note = 5-methyl cytidine
  modified_base 8..9: mod_base = OTHER; note = 5-methyl cytidine
  modified_base 11: mod_base = OTHER; note = 5-methyl cytidine
  modified_base 14..16: mod_base = OTHER; note = 5-methyl cytidine
  modified_base 19: mod_base = OTHER; note = 5-methyl cytidine
cggaattccacaaccctgca

SEQ ID NO: 773 - DNA, 20 bp, synthetic construct
  source 1..20: mol_type = other DNA
  modified_base 1..20: mod_base = OTHER; note = Phosphorothioate linkage
  modified_base 1..5: mod_base = OTHER; note = 2'-O-(2-methoxyethyl) ribonucleotide
  misc_feature 6..15: note = DNA
  modified_base 16..20: mod_base = OTHER; note = 2'-O-(2-methoxyethyl) ribonucleotide
  modified_base 5: mod_base = OTHER; note = 5-methyl cytidine
  modified_base 7..8: mod_base = OTHER; note = 5-methyl cytidine
  modified_base 12: mod_base = OTHER; note = 5-methyl cytidine
  modified_base 16: mod_base = OTHER; note = 5-methyl cytidine
  modified_base 18: mod_base = OTHER; note = 5-methyl cytidine
  modified_base 20: mod_base = OTHER; note = 5-methyl cytidine
gatgcaccagtcttacacac

SEQ ID NO: 774 - DNA, 20 bp, synthetic construct
  source 1..20: mol_type = other DNA
  modified_base 1..20: mod_base = OTHER; note = Phosphorothioate linkage
  modified_base 1..5: mod_base = OTHER; note = 2'-O-(2-methoxyethyl) ribonucleotide
  misc_feature 6..15: note = DNA
  modified_base 16..20: mod_base = OTHER; note = 2'-O-(2-methoxyethyl) ribonucleotide
  modified_base 5: mod_base = OTHER; note = 5-methyl cytidine
  modified_base 7..8: mod_base = OTHER; note = 5-methyl cytidine
  modified_base 20: mod_base = OTHER; note = 5-methyl cytidine
gggacacctgtatgaatgtc

SEQ ID NO: 775 - DNA, 20 bp, synthetic construct
  source 1..20: mol_type = other DNA
  modified_base 1..20: mod_base = OTHER; note = Phosphorothioate linkage
  modified_base 1..5: mod_base = OTHER; note = 2'-O-(2-methoxyethyl) ribonucleotide
  misc_feature 6..15: note = DNA
  modified_base 16..20: mod_base = OTHER; note = 2'-O-(2-methoxyethyl) ribonucleotide
  modified_base 3: mod_base = OTHER; note = 5-methyl cytidine
  modified_base 9: mod_base = OTHER; note = 5-methyl cytidine
  modified_base 11: mod_base = OTHER; note = 5-methyl cytidine
  modified_base 13: mod_base = OTHER; note = 5-methyl cytidine
  modified_base 20: mod_base = OTHER; note = 5-methyl cytidine
ggctgtgtctcactagaagc

SEQ ID NO: 776 - DNA, 20 bp, synthetic construct
  source 1..20: mol_type = other DNA
  modified_base 1..20: mod_base = OTHER; note = Phosphorothioate linkage
  modified_base 1..5: mod_base = OTHER; note = 2'-O-(2-methoxyethyl) ribonucleotide
  misc_feature 6..15: note = DNA
  modified_base 16..20: mod_base = OTHER; note = 2'-O-(2-methoxyethyl) ribonucleotide
  modified_base 4: mod_base = OTHER; note = 5-methyl cytidine
  modified_base 7: mod_base = OTHER; note = 5-methyl cytidine
  modified_base 10: mod_base = OTHER; note = 5-methyl cytidine
  modified_base 12..15: mod_base = OTHER; note = 5-methyl cytidine
  modified_base 18..19: mod_base = OTHER; note = 5-methyl cytidine
gttcagcagcaccccttcct

SEQ ID NO: 777 - DNA, 20 bp, synthetic construct
  source 1..20: mol_type = other DNA
  modified_base 1..20: mod_base = OTHER; note = Phosphorothioate linkage
  modified_base 1..5: mod_base = OTHER; note = 2'-O-(2-methoxyethyl) ribonucleotide
  misc_feature 6..15: note = DNA
  modified_base 16..20: mod_base = OTHER; note = 2'-O-(2-methoxyethyl) ribonucleotide
  modified_base 10: mod_base = OTHER; note = 5-methyl cytidine
  modified_base 13: mod_base = OTHER; note = 5-methyl cytidine
gagggtgagctgcaatgttg

SEQ ID NO: 778 - DNA, 20 bp, synthetic construct
  source 1..20: mol_type = other DNA
  modified_base 1..20: mod_base = OTHER; note = Phosphorothioate linkage
  modified_base 1..5: mod_base = OTHER; note = 2'-O-(2-methoxyethyl) ribonucleotide
  misc_feature 6..15: note = DNA
  modified_base 16..20: mod_base = OTHER; note = 2'-O-(2-methoxyethyl) ribonucleotide
  modified_base 2: mod_base = OTHER; note = 5-methyl cytidine
  modified_base 8: mod_base = OTHER; note = 5-methyl cytidine
  modified_base 10: mod_base = OTHER; note = 5-methyl cytidine
  modified_base 13: mod_base = OTHER; note = 5-methyl cytidine
  modified_base 19: mod_base = OTHER; note = 5-methyl cytidine
gctgaagctcgtctggaaca

SEQ ID NO: 779 - DNA, 20 bp, synthetic construct
  source 1..20: mol_type = other DNA
  modified_base 1..20: mod_base = OTHER; note = Phosphorothioate linkage
  modified_base 1..5: mod_base = OTHER; note = 2'-O-(2-methoxyethyl) ribonucleotide
  misc_feature 6..15: note = DNA
  modified_base 16..20: mod_base = OTHER; note = 2'-O-(2-methoxyethyl) ribonucleotide
  modified_base 4: mod_base = OTHER; note = 5-methyl cytidine
  modified_base 10: mod_base = OTHER; note = 5-methyl cytidine
  modified_base 13: mod_base = OTHER; note = 5-methyl cytidine
  modified_base 17: mod_base = OTHER; note = 5-methyl cytidine
gttctgtgtcagctatctat

SEQ ID NO: 780 - DNA, 20 bp, synthetic construct
  source 1..20: mol_type = other DNA
  modified_base 1..20: mod_base = OTHER; note = Phosphorothioate linkage
  modified_base 1..5: mod_base = OTHER; note = 2'-O-(2-methoxyethyl) ribonucleotide
  misc_feature 6..15: note = DNA
  modified_base 16..20: mod_base = OTHER; note = 2'-O-(2-methoxyethyl) ribonucleotide
  modified_base 4: mod_base = OTHER; note = 5-methyl cytidine
  modified_base 8: mod_base = OTHER; note = 5-methyl cytidine
  modified_base 13: mod_base = OTHER; note = 5-methyl cytidine
  modified_base 15: mod_base = OTHER; note = 5-methyl cytidine
ttgcaatcgtggcgcttggg

SEQ ID NO: 781 - DNA, 20 bp, synthetic construct
  source 1..20: mol_type = other DNA
  modified_base 1..20: mod_base = OTHER; note = Phosphorothioate linkage
  modified_base 1..5: mod_base = OTHER; note = 2'-O-(2-methoxyethyl) ribonucleotide
  misc_feature 6..15: note = DNA
  modified_base 16..20: mod_base = OTHER; note = 2'-O-(2-methoxyethyl) ribonucleotide
  modified_base 1: mod_base = OTHER; note = 5-methyl cytidine
  modified_base 7: mod_base = OTHER; note = 5-methyl cytidine
  modified_base 12..14: mod_base = OTHER; note = 5-methyl cytidine
  modified_base 17: mod_base = OTHER; note = 5-methyl cytidine
  modified_base 20: mod_base = OTHER; note = 5-methyl cytidine
ctaggtctaatcccagcagc

SEQ ID NO: 782 - DNA, 20 bp, synthetic construct
  source 1..20: mol_type = other DNA
  modified_base 1..20: mod_base = OTHER; note = Phosphorothioate linkage
  modified_base 1..5: mod_base = OTHER; note = 2'-O-(2-methoxyethyl) ribonucleotide
  misc_feature 6..15: note = DNA
  modified_base 16..20: mod_base = OTHER; note = 2'-O-(2-methoxyethyl) ribonucleotide
  modified_base 3: mod_base = OTHER; note = 5-methyl cytidine
  modified_base 5: mod_base = OTHER; note = 5-methyl cytidine
  modified_base 9..11: mod_base = OTHER; note = 5-methyl cytidine
  modified_base 14: mod_base = OTHER; note = 5-methyl cytidine
  modified_base 19: mod_base = OTHER; note = 5-methyl cytidine
cagttggtagcacttgtagc

SEQ ID NO: 783 - DNA, 20 bp, synthetic construct
  source 1..20: mol_type = other DNA
  modified_base 1..20: mod_base = OTHER; note = Phosphorothioate linkage
  modified_base 1..5: mod_base = OTHER; note = 2'-O-(2-methoxyethyl) ribonucleotide
  misc_feature 6..15: note = DNA
  modified_base 16..20: mod_base = OTHER; note = 2'-O-(2-methoxyethyl) ribonucleotide
  modified_base 5..8: mod_base = OTHER; note = 5-methyl cytidine
  modified_base 15: mod_base = OTHER; note = 5-methyl cytidine
  modified_base 20: mod_base = OTHER; note = 5-methyl cytidine
atttccccttgaggcagtgc

SEQ ID NO: 784 - DNA, 20 bp, synthetic construct
  source 1..20: mol_type = other DNA
  modified_base 1..20: mod_base = OTHER; note = Phosphorothioate linkage
  modified_base 1..5: mod_base = OTHER; note = 2'-O-(2-methoxyethyl) ribonucleotide
  misc_feature 6..15: note = DNA
  modified_base 16..20: mod_base = OTHER; note = 2'-O-(2-methoxyethyl) ribonucleotide
  modified_base 4: mod_base = OTHER; note = 5-methyl cytidine
  modified_base 12: mod_base = OTHER; note = 5-methyl cytidine
  modified_base 20: mod_base = OTHER; note = 5-methyl cytidine
agtcgtggtttctgggagtc

SEQ ID NO: 785 - DNA, 20 bp, synthetic construct
  source 1..20: mol_type = other DNA
  modified_base 1..20: mod_base = OTHER; note = Phosphorothioate linkage
  modified_base 1..5: mod_base = OTHER; note = 2'-O-(2-methoxyethyl) ribonucleotide
  misc_feature 6..15: note = DNA
  modified_base 16..20: mod_base = OTHER; note = 2'-O-(2-methoxyethyl) ribonucleotide
  modified_base 6: mod_base = OTHER; note = 5-methyl cytidine
  modified_base 8: mod_base = OTHER; note = 5-methyl cytidine
  modified_base 14: mod_base = OTHER; note = 5-methyl cytidine
gggtgcgctaatgctatggt

SEQ ID NO: 786 - DNA, 20 bp, synthetic construct
  source 1..20: mol_type = other DNA
  modified_base 1..20: mod_base = OTHER; note = Phosphorothioate linkage
  modified_base 1..5: mod_base = OTHER; note = 2'-O-(2-methoxyethyl) ribonucleotide
  misc_feature 6..15: note = DNA
  modified_base 16..20: mod_base = OTHER; note = 2'-O-(2-methoxyethyl) ribonucleotide
  modified_base 2..3: mod_base = OTHER; note = 5-methyl cytidine
  modified_base 10: mod_base = OTHER; note = 5-methyl cytidine
  modified_base 16..19: mod_base = OTHER; note = 5-methyl cytidine
gccattaagctgtagcccca

SEQ ID NO: 787 - DNA, 20 bp, synthetic construct
  source 1..20: mol_type = other DNA
  modified_base 1..20: mod_base = OTHER; note = Phosphorothioate linkage
  modified_base 1..5: mod_base = OTHER; note = 2'-O-(2-methoxyethyl) ribonucleotide
  misc_feature 6..15: note = DNA
  modified_base 16..20: mod_base = OTHER; note = 2'-O-(2-methoxyethyl) ribonucleotide
  modified_base 1..2: mod_base = OTHER; note = 5-methyl cytidine
  modified_base 7..8: mod_base = OTHER; note = 5-methyl cytidine
  modified_base 10: mod_base = OTHER; note = 5-methyl cytidine
  modified_base 12: mod_base = OTHER; note = 5-methyl cytidine
ccagaacctctcgtgttaga

SEQ ID NO: 788 - DNA, 20 bp, synthetic construct
  source 1..20: mol_type = other DNA
  modified_base 1..20: mod_base = OTHER; note = Phosphorothioate linkage
  modified_base 1..5: mod_base = OTHER; note = 2'-O-(2-methoxyethyl) ribonucleotide
  misc_feature 6..15: note = DNA
  modified_base 16..20: mod_base = OTHER; note = 2'-O-(2-methoxyethyl) ribonucleotide
  modified_base 11: mod_base = OTHER; note = 5-methyl cytidine
  modified_base 13: mod_base = OTHER; note = 5-methyl cytidine
  modified_base 15..17: mod_base = OTHER; note = 5-methyl cytidine
  modified_base 19..20: mod_base = OTHER; note = 5-methyl cytidine
gtgaaatatgcgctccctcc

SEQ ID NO: 789 - DNA, 20 bp, synthetic construct
  source 1..20: mol_type = other DNA
  modified_base 1..20: mod_base = OTHER; note = Phosphorothioate linkage
  modified_base 1..5: mod_base = OTHER; note = 2'-O-(2-methoxyethyl) ribonucleotide
  misc_feature 6..15: note = DNA
  modified_base 16..20: mod_base = OTHER; note = 2'-O-(2-methoxyethyl) ribonucleotide
  modified_base 16: mod_base = OTHER; note = 5-methyl cytidine
ggtggtggtatgtggctttg

SEQ ID NO: 790 - DNA, 20 bp, synthetic construct
  source 1..20: mol_type = other DNA
  modified_base 1..20: mod_base = OTHER; note = Phosphorothioate linkage
  modified_base 1..5: mod_base = OTHER; note = 2'-O-(2-methoxyethyl) ribonucleotide
  misc_feature 6..15: note = DNA
  modified_base 16..20: mod_base = OTHER; note = 2'-O-(2-methoxyethyl) ribonucleotide
  modified_base 1: mod_base = OTHER; note = 5-methyl cytidine
  modified_base 10: mod_base = OTHER; note = 5-methyl cytidine
caagataaacaaggtagggt

SEQ ID NO: 791 - RNA, 20 nt, synthetic construct
  source 1..20: mol_type = other RNA
  modified_base 1..20: mod_base = OTHER; note = Phosphorothioate linkage
  modified_base 1..20: mod_base = OTHER; note = 2'-O-(2-methoxyethyl) ribonucleotide
  modified_base 4: mod_base = OTHER; note = 5-methyl cytidine
  modified_base 6: mod_base = OTHER; note = 5-methyl cytidine
  modified_base 10: mod_base = OTHER; note = 5-methyl cytidine
  modified_base 13..15: mod_base = OTHER; note = 5-methyl cytidine
  modified_base 17..18: mod_base = OTHER; note = 5-methyl cytidine
tggcacttgcaaccctccta

SEQ ID NO: 792 - RNA, 20 nt, synthetic construct
  source 1..20: mol_type = other RNA
  modified_base 1..20: mod_base = OTHER; note = Phosphorothioate linkage
  modified_base 1..20: mod_base = OTHER; note = 2'-O-(2-methoxyethyl) ribonucleotide
  modified_base 3: mod_base = OTHER; note = 5-methyl cytidine
  modified_base 8..9: mod_base = OTHER; note = 5-methyl cytidine
  modified_base 12: mod_base = OTHER; note = 5-methyl cytidine
  modified_base 20: mod_base = OTHER; note = 5-methyl cytidine
ggcagatccttctatgtagc

SEQ ID NO: 793 - RNA, 20 nt, synthetic construct
  source 1..20: mol_type = other RNA
  modified_base 1..20: mod_base = OTHER; note = Phosphorothioate linkage
  modified_base 1..20: mod_base = OTHER; note = 2'-O-(2-methoxyethyl) ribonucleotide
  modified_base 9: mod_base = OTHER; note = 5-methyl cytidine
gggatgttctttgaattagg

SEQ ID NO: 794 - RNA, 20 nt, synthetic construct
  source 1..20: mol_type = other RNA
  modified_base 1..20: mod_base = OTHER; note = Phosphorothioate linkage
  modified_base 1..20: mod_base = OTHER; note = 2'-O-(2-methoxyethyl) ribonucleotide
  modified_base 1..2: mod_base = OTHER; note = 5-methyl cytidine
  modified_base 14: mod_base = OTHER; note = 5-methyl cytidine
  modified_base 20: mod_base = OTHER; note = 5-methyl cytidine
ccgttgagaggaactgggtc

SEQ ID NO: 795 - RNA, 20 nt, synthetic construct
  source 1..20: mol_type = other RNA
  modified_base 1..20: mod_base = OTHER; note = Phosphorothioate linkage
  modified_base 1..20: mod_base = OTHER; note = 2'-O-(2-methoxyethyl) ribonucleotide
  modified_base 18..19: mod_base = OTHER; note = 5-methyl cytidine
gtgtagtgtagaggtggcca

SEQ ID NO: 796 - RNA, 20 nt, synthetic construct
  source 1..20: mol_type = other RNA
  modified_base 1..20: mod_base = OTHER; note = Phosphorothioate linkage
  modified_base 1..20: mod_base = OTHER; note = 2'-O-(2-methoxyethyl) ribonucleotide
  modified_base 5: mod_base = OTHER; note = 5-methyl cytidine
  modified_base 7..8: mod_base = OTHER; note = 5-methyl cytidine
  modified_base 13: mod_base = OTHER; note = 5-methyl cytidine
  modified_base 15..17: mod_base = OTHER; note = 5-methyl cytidine
aaggctccagttctccctag

SEQ ID NO: 797 - RNA, 20 nt, synthetic construct
  source 1..20: mol_type = other RNA
  modified_base 1..20: mod_base = OTHER; note = Phosphorothioate linkage
  modified_base 1..20: mod_base = OTHER; note = 2'-O-(2-methoxyethyl) ribonucleotide
  modified_base 14: mod_base = OTHER; note = 5-methyl cytidine
  modified_base 19: mod_base = OTHER; note = 5-methyl cytidine
tagtggaagatgtcggagct

SEQ ID NO: 798 - RNA, 20 nt, synthetic construct
  source 1..20: mol_type = other RNA
  modified_base 1..20: mod_base = OTHER; note = Phosphorothioate linkage
  modified_base 1..20: mod_base = OTHER; note = 2'-O-(2-methoxyethyl) ribonucleotide
  modified_base 1: mod_base = OTHER; note = 5-methyl cytidine
  modified_base 6..9: mod_base = OTHER; note = 5-methyl cytidine
  modified_base 11: mod_base = OTHER; note = 5-methyl cytidine
  modified_base 14: mod_base = OTHER; note = 5-methyl cytidine
  modified_base 16: mod_base = OTHER; note = 5-methyl cytidine
  modified_base 18: mod_base = OTHER; note = 5-methyl cytidine
catttcccctcgacactcag

SEQ ID NO: 799 - RNA, 20 nt, synthetic construct
  source 1..20: mol_type = other RNA
  modified_base 1..20: mod_base = OTHER; note = Phosphorothioate linkage
  modified_base 1..20: mod_base = OTHER; note = 2'-O-(2-methoxyethyl) ribonucleotide
  modified_base 1: mod_base = OTHER; note = 5-methyl cytidine
  modified_base 4: mod_base = OTHER; note = 5-methyl cytidine
  modified_base 13: mod_base = OTHER; note = 5-methyl cytidine
  modified_base 15: mod_base = OTHER; note = 5-methyl cytidine
  modified_base 17..18: mod_base = OTHER; note = 5-methyl cytidine
catctggattggctcacctt

SEQ ID NO: 800 - RNA, 20 nt, synthetic construct
  source 1..20: mol_type = other RNA
  modified_base 1..20: mod_base = OTHER; note = Phosphorothioate linkage
  modified_base 1..20: mod_base = OTHER; note = 2'-O-(2-methoxyethyl) ribonucleotide
  modified_base 2: mod_base = OTHER; note = 5-methyl cytidine
  modified_base 7..11: mod_base = OTHER; note = 5-methyl cytidine
  modified_base 13: mod_base = OTHER; note = 5-methyl cytidine
  modified_base 16..17: mod_base = OTHER; note = 5-methyl cytidine
  modified_base 19: mod_base = OTHER; note = 5-methyl cytidine
acttttcccccgctgcctct

SEQ ID NO: 801 - RNA, 20 nt, synthetic construct
  source 1..20: mol_type = other RNA
  modified_base 1..20: mod_base = OTHER; note = Phosphorothioate linkage
  modified_base 1..20: mod_base = OTHER; note = 2'-O-(2-methoxyethyl) ribonucleotide
  modified_base 3: mod_base = OTHER; note = 5-methyl cytidine
  modified_base 11: mod_base = OTHER; note = 5-methyl cytidine
  modified_base 17..19: mod_base = OTHER; note = 5-methyl cytidine
ggcgtgatggctgagtccct

SEQ ID NO: 802 - RNA, 20 nt, synthetic construct
  source 1..20: mol_type = other RNA
  modified_base 1..20: mod_base = OTHER; note = Phosphorothioate linkage
  modified_base 1..20: mod_base = OTHER; note = 2'-O-(2-methoxyethyl) ribonucleotide
  modified_base 1: mod_base = OTHER; note = 5-methyl cytidine
  modified_base 3: mod_base = OTHER; note = 5-methyl cytidine
  modified_base 7: mod_base = OTHER; note = 5-methyl cytidine
  modified_base 11: mod_base = OTHER; note = 5-methyl cytidine
  modified_base 13: mod_base = OTHER; note = 5-methyl cytidine
  modified_base 16: mod_base = OTHER; note = 5-methyl cytidine
ctctttcggacgctgcaagt

SEQ ID NO: 803 - RNA, 20 nt, synthetic construct
  source 1..20: mol_type = other RNA
  modified_base 1..20: mod_base = OTHER; note = Phosphorothioate linkage
  modified_base 1..20: mod_base = OTHER; note = 2'-O-(2-methoxyethyl) ribonucleotide
  modified_base 3: mod_base = OTHER; note = 5-methyl cytidine
  modified_base 5..6: mod_base = OTHER; note = 5-methyl cytidine
  modified_base 11..12: mod_base = OTHER; note = 5-methyl cytidine
  modified_base 15: mod_base = OTHER; note = 5-methyl cytidine
  modified_base 17: mod_base = OTHER; note = 5-methyl cytidine
gtctccaggtccggctcttt

SEQ ID NO: 804 - RNA, 20 nt, synthetic construct
  source 1..20: mol_type = other RNA
  modified_base 1..20: mod_base = OTHER; note = Phosphorothioate linkage
  modified_base 1..20: mod_base = OTHER; note = 2'-O-(2-methoxyethyl) ribonucleotide
  modified_base 2: mod_base = OTHER; note = 5-methyl cytidine
  modified_base 4..5: mod_base = OTHER; note = 5-methyl cytidine
  modified_base 7: mod_base = OTHER; note = 5-methyl cytidine
  modified_base 9: mod_base = OTHER; note = 5-methyl cytidine
  modified_base 14..15: mod_base = OTHER; note = 5-methyl cytidine
  modified_base 19: mod_base = OTHER; note = 5-methyl cytidine
gctcctctcttgtccgtact

SEQ ID NO: 805 - RNA, 20 nt, synthetic construct
  source 1..20: mol_type = other RNA
  modified_base 1..20: mod_base = OTHER; note = Phosphorothioate linkage
  modified_base 1..20: mod_base = OTHER; note = 2'-O-(2-methoxyethyl) ribonucleotide
  modified_base 3: mod_base = OTHER; note = 5-methyl cytidine
  modified_base 5: mod_base = OTHER; note = 5-methyl cytidine
  modified_base 9..11: mod_base = OTHER; note = 5-methyl cytidine
  modified_base 14: mod_base = OTHER; note = 5-methyl cytidine
  modified_base 19: mod_base = OTHER; note = 5-methyl cytidine
ttctcttgcccagcatgtcg

SEQ ID NO: 806 - RNA, 20 nt, synthetic construct
  source 1..20: mol_type = other RNA
  modified_base 1..20: mod_base = OTHER; note = Phosphorothioate linkage
  modified_base 1..20: mod_base = OTHER; note = 2'-O-(2-methoxyethyl) ribonucleotide
  modified_base 3: mod_base = OTHER; note = 5-methyl cytidine
  modified_base 8: mod_base = OTHER; note = 5-methyl cytidine
  modified_base 10..11: mod_base = OTHER; note = 5-methyl cytidine
  modified_base 13..16: mod_base = OTHER; note = 5-methyl cytidine
  modified_base 18: mod_base = OTHER; note = 5-methyl cytidine
  modified_base 20: mod_base = OTHER; note = 5-methyl cytidine
gtagagacacctccccgcac

SEQ ID NO: 807 - RNA, 20 nt, synthetic construct
  source 1..20: mol_type = other RNA
  modified_base 1..20: mod_base = OTHER; note = Phosphorothioate linkage
  modified_base 1..20: mod_base = OTHER; note = 2'-O-(2-methoxyethyl) ribonucleotide
  modified_base 1: mod_base = OTHER; note = 5-methyl cytidine
  modified_base 7: mod_base = OTHER; note = 5-methyl cytidine
  modified_base 9: mod_base = OTHER; note = 5-methyl cytidine
  modified_base 13: mod_base = OTHER; note = 5-methyl cytidine
ctgatgcactaacgaggttg

SEQ ID NO: 808 - RNA, 20 nt, synthetic construct
  source 1..20: mol_type = other RNA
  modified_base 1..20: mod_base = OTHER; note = Phosphorothioate linkage
  modified_base 1..20: mod_base = OTHER; note = 2'-O-(2-methoxyethyl) ribonucleotide
  modified_base 2: mod_base = OTHER; note = 5-methyl cytidine
  modified_base 6: mod_base = OTHER; note = 5-methyl cytidine
  modified_base 8..11: mod_base = OTHER; note = 5-methyl cytidine
  modified_base 14: mod_base = OTHER; note = 5-methyl cytidine
  modified_base 17: mod_base = OTHER; note = 5-methyl cytidine
acaatctccccggctactgt

SEQ ID NO: 809 - RNA, 20 nt, synthetic construct
  source 1..20: mol_type = other RNA
  modified_base 1..20: mod_base = OTHER; note = Phosphorothioate linkage
  modified_base 1..20: mod_base = OTHER; note = 2'-O-(2-methoxyethyl) ribonucleotide
  modified_base 5..7: mod_base = OTHER; note = 5-methyl cytidine
  modified_base 13: mod_base = OTHER; note = 5-methyl cytidine
  modified_base 15..16: mod_base = OTHER; note = 5-methyl cytidine
  modified_base 20: mod_base = OTHER; note = 5-methyl cytidine
gaagccctggatctccgagc

SEQ ID NO: 810 - RNA, 20 nt, synthetic construct
  source 1..20: mol_type = other RNA
  modified_base 1..20: mod_base = OTHER; note = Phosphorothioate linkage
  modified_base 1..20: mod_base = OTHER; note = 2'-O-(2-methoxyethyl) ribonucleotide
  modified_base 1..3: mod_base = OTHER; note = 5-methyl cytidine
  modified_base 5..6: mod_base = OTHER; note = 5-methyl cytidine
  modified_base 8: mod_base = OTHER; note = 5-methyl cytidine
  modified_base 11: mod_base = OTHER; note = 5-methyl cytidine
  modified_base 17: mod_base = OTHER; note = 5-methyl cytidine
cccgcctctacgtagacaag

SEQ ID NO: 811 - RNA, 20 nt, synthetic construct
  source 1..20: mol_type = other RNA
  modified_base 1..20: mod_base = OTHER; note = Phosphorothioate linkage
  modified_base 1..20: mod_base = OTHER; note = 2'-O-(2-methoxyethyl) ribonucleotide
  modified_base 14: mod_base = OTHER; note = 5-methyl cytidine
ggaggaatgtgaactgagta

SEQ ID NO: 812 - RNA, 20 nt, synthetic construct
  source 1..20: mol_type = other RNA
  modified_base 1..20: mod_base = OTHER; note = Phosphorothioate linkage
  modified_base 1..20: mod_base = OTHER; note = 2'-O-(2-methoxyethyl) ribonucleotide
  modified_base 1: mod_base = OTHER; note = 5-methyl cytidine
  modified_base 4: mod_base = OTHER; note = 5-methyl cytidine
  modified_base 7: mod_base = OTHER; note = 5-methyl cytidine
  modified_base 9: mod_base = OTHER; note = 5-methyl cytidine
  modified_base 11: mod_base = OTHER; note = 5-methyl cytidine
  modified_base 14..15: mod_base = OTHER; note = 5-methyl cytidine
  modified_base 17..18: mod_base = OTHER; note = 5-methyl cytidine
ctgcaacactctgccgccag

SEQ ID NO: 813 - RNA, 20 nt, synthetic construct
  source 1..20: mol_type = other RNA
  modified_base 1..20: mod_base = OTHER; note = Phosphorothioate linkage
  modified_base 1..20: mod_base = OTHER; note = 2'-O-(2-methoxyethyl) ribonucleotide
  modified_base 1..2: mod_base = OTHER; note = 5-methyl cytidine
  modified_base 4..5: mod_base = OTHER; note = 5-methyl cytidine
  modified_base 12: mod_base = OTHER; note = 5-methyl cytidine
  modified_base 15..16: mod_base = OTHER; note = 5-methyl cytidine
cctccagtaaacgaccttga

SEQ ID NO: 814 - RNA, 20 nt, synthetic construct
  source 1..20: mol_type = other RNA
  modified_base 1..20: mod_base = OTHER; note = Phosphorothioate linkage
  modified_base 1..20: mod_base = OTHER; note = 2'-O-(2-methoxyethyl) ribonucleotide
  modified_base 5..7: mod_base = OTHER; note = 5-methyl cytidine
  modified_base 11..12: mod_base = OTHER; note = 5-methyl cytidine
  modified_base 18: mod_base = OTHER; note = 5-methyl cytidine
aagtcccgatccagaagcag

SEQ ID NO: 815 - RNA, 20 nt, synthetic construct
  source 1..20: mol_type = other RNA
  modified_base 1..20: mod_base = OTHER; note = Phosphorothioate linkage
  modified_base 1..20: mod_base = OTHER; note = 2'-O-(2-methoxyethyl) ribonucleotide
  modified_base 2: mod_base = OTHER; note = 5-methyl cytidine
  modified_base 5..6: mod_base = OTHER; note = 5-methyl cytidine
  modified_base 10: mod_base = OTHER; note = 5-methyl cytidine
  modified_base 20: mod_base = OTHER; note = 5-methyl cytidine
tctgccaggcgtgaagagac

SEQ ID NO: 816 - RNA, 20 nt, synthetic construct
  source 1..20: mol_type = other RNA
  modified_base 1..20: mod_base = OTHER; note = Phosphorothioate linkage
  modified_base 1..20: mod_base = OTHER; note = 2'-O-(2-methoxyethyl) ribonucleotide
  modified_base 3: mod_base = OTHER; note = 5-methyl cytidine
  modified_base 6..7: mod_base = OTHER; note = 5-methyl cytidine
  modified_base 10: mod_base = OTHER; note = 5-methyl cytidine
  modified_base 17: mod_base = OTHER; note = 5-methyl cytidine
atcttccaactggtttcgag

SEQ ID NO: 817 - RNA, 20 nt, synthetic construct
  source 1..20: mol_type = other RNA
  modified_base 1..20: mod_base = OTHER; note = Phosphorothioate linkage
  modified_base 1..20: mod_base = OTHER; note = 2'-O-(2-methoxyethyl) ribonucleotide
  modified_base 5: mod_base = OTHER; note = 5-methyl cytidine
  modified_base 10..11: mod_base = OTHER; note = 5-methyl cytidine
  modified_base 13: mod_base = OTHER; note = 5-methyl cytidine
  modified_base 15: mod_base = OTHER; note = 5-methyl cytidine
  modified_base 17..20: mod_base = OTHER; note = 5-methyl cytidine
tagtctaagccactctcccc

SEQ ID NO: 818 - RNA, 20 nt, synthetic construct
  source 1..20: mol_type = other RNA
  modified_base 1..20: mod_base = OTHER; note = Phosphorothioate linkage
  modified_base 1..20: mod_base = OTHER; note = 2'-O-(2-methoxyethyl) ribonucleotide
  modified_base 2: mod_base = OTHER; note = 5-methyl cytidine
  modified_base 5: mod_base = OTHER; note = 5-methyl cytidine
  modified_base 8: mod_base = OTHER; note = 5-methyl cytidine
  modified_base 13..15: mod_base = OTHER; note = 5-methyl cytidine
  modified_base 20: mod_base = OTHER; note = 5-methyl cytidine
acatctacagtgcccggtac

SEQ ID NO: 819 - RNA, 20 nt, synthetic construct
  source 1..20: mol_type = other RNA
  modified_base 1..20: mod_base = OTHER; note = Phosphorothioate linkage
  modified_base 1..20: mod_base = OTHER; note = 2'-O-(2-methoxyethyl) ribonucleotide
  modified_base 2: mod_base = OTHER; note = 5-methyl cytidine
  modified_base 5..10: mod_base = OTHER; note = 5-methyl cytidine
  modified_base 19..20: mod_base = OTHER; note = 5-methyl cytidine
tcttccccccagtttgagcc

SEQ ID NO: 820 - RNA, 20 nt, synthetic construct
  source 1..20: mol_type = other RNA
  modified_base 1..20: mod_base = OTHER; note = Phosphorothioate linkage
  modified_base 1..20: mod_base = OTHER; note = 2'-O-(2-methoxyethyl) ribonucleotide
  modified_base 2: mod_base = OTHER; note = 5-methyl cytidine
  modified_base 7: mod_base = OTHER; note = 5-methyl cytidine
  modified_base 11: mod_base = OTHER; note = 5-methyl cytidine
gcagtgctatcaatatggat

SEQ ID NO: 821 - RNA, 20 nt, synthetic construct
  source 1..20: mol_type = other RNA
  modified_base 1..20: mod_base = OTHER; note = Phosphorothioate linkage
  modified_base 1..20: mod_base = OTHER; note = 2'-O-(2-methoxyethyl) ribonucleotide
  modified_base 4..6: mod_base = OTHER; note = 5-methyl cytidine
  modified_base 8..9: mod_base = OTHER; note = 5-methyl cytidine
  modified_base 14: mod_base = OTHER; note = 5-methyl cytidine
  modified_base 17..18: mod_base = OTHER; note = 5-methyl cytidine
  modified_base 20: mod_base = OTHER; note = 5-methyl cytidine
tgtcccaccttatcagcctc

SEQ ID NO: 822 - RNA, 20 nt, synthetic construct
  source 1..20: mol_type = other RNA
  modified_base 1..20: mod_base = OTHER; note = Phosphorothioate linkage
  modified_base 1..20: mod_base = OTHER; note = 2'-O-(2-methoxyethyl) ribonucleotide
  modified_base 1..3: mod_base = OTHER; note = 5-methyl cytidine
  modified_base 7: mod_base = OTHER; note = 5-methyl cytidine
  modified_base 14: mod_base = OTHER; note = 5-methyl cytidine
  modified_base 18: mod_base = OTHER; note = 5-methyl cytidine
cccttgctagaggctgtctg

SEQ ID NO: 823 - RNA, 20 nt, synthetic construct
  source 1..20: mol_type = other RNA
  modified_base 1..20: mod_base = OTHER; note = Phosphorothioate linkage
  modified_base 1..20: mod_base = OTHER; note = 2'-O-(2-methoxyethyl) ribonucleotide
  modified_base 2..4: mod_base = OTHER; note = 5-methyl cytidine
  modified_base 9: mod_base = OTHER; note = 5-methyl cytidine
  modified_base 15: mod_base = OTHER; note = 5-methyl cytidine
  modified_base 20: mod_base = OTHER; note = 5-methyl cytidine
gcccttatcttgaacgtggc

SEQ ID NO: 824 - RNA, 20 nt, synthetic construct
  source 1..20: mol_type = other RNA
  modified_base 1..20: mod_base = OTHER; note = Phosphorothioate linkage
  modified_base 1..20: mod_base = OTHER; note = 2'-O-(2-methoxyethyl) ribonucleotide
  modified_base 2..3: mod_base = OTHER; note = 5-methyl cytidine
  modified_base 6: mod_base = OTHER; note = 5-methyl cytidine
  modified_base 8: mod_base = OTHER; note = 5-methyl cytidine
  modified_base 11: mod_base = OTHER; note = 5-methyl cytidine
  modified_base 14..15: mod_base = OTHER; note = 5-methyl cytidine
  modified_base 17..18: mod_base = OTHER; note = 5-methyl cytidine
tccatctcgacagccaccag

SEQ ID NO: 825 - RNA, 20 nt, synthetic construct
  source 1..20: mol_type = other RNA
  modified_base 1..20: mod_base = OTHER; note = Phosphorothioate linkage
  modified_base 1..20: mod_base = OTHER; note = 2'-O-(2-methoxyethyl) ribonucleotide
  modified_base 1..2: mod_base = OTHER; note = 5-methyl cytidine
  modified_base 8: mod_base = OTHER; note = 5-methyl cytidine
  modified_base 10: mod_base = OTHER; note = 5-methyl cytidine
  modified_base 15: mod_base = OTHER; note = 5-methyl cytidine
  modified_base 17..19: mod_base = OTHER; note = 5-methyl cytidine
ccatggtctctattcaccca

SEQ ID NO: 826 - RNA, 20 nt, synthetic construct
  source 1..20: mol_type = other RNA
  modified_base 1..20: mod_base = OTHER; note = Phosphorothioate linkage
  modified_base 1..20: mod_base = OTHER; note = 2'-O-(2-methoxyethyl) ribonucleotide
  modified_base 2: mod_base = OTHER; note = 5-methyl cytidine
  modified_base 6..7: mod_base = OTHER; note = 5-methyl cytidine
  modified_base 12: mod_base = OTHER; note = 5-methyl cytidine
  modified_base 20: mod_base = OTHER; note = 5-methyl cytidine
actgtcctgaactgtatggc

SEQ ID NO: 827 - RNA, 20 nt, synthetic construct
  source 1..20: mol_type = other RNA
  modified_base 1..20: mod_base = OTHER; note = Phosphorothioate linkage
  modified_base 1..20: mod_base = OTHER; note = 2'-O-(2-methoxyethyl) ribonucleotide
  modified_base 1: mod_base = OTHER; note = 5-methyl cytidine
  modified_base 8..9: mod_base = OTHER; note = 5-methyl cytidine
  modified_base 11: mod_base = OTHER; note = 5-methyl cytidine
  modified_base 14..16: mod_base = OTHER; note = 5-methyl cytidine
  modified_base 19: mod_base = OTHER; note = 5-methyl cytidine
cggaattccacaaccctgca

SEQ ID NO: 828 - RNA, 20 nt, synthetic construct
  source 1..20: mol_type = other RNA
  modified_base 1..20: mod_base = OTHER; note = Phosphorothioate linkage
  modified_base 1..20: mod_base = OTHER; note = 2'-O-(2-methoxyethyl) ribonucleotide
  modified_base 5: mod_base = OTHER; note = 5-methyl cytidine
  modified_base 7..8: mod_base = OTHER; note = 5-methyl cytidine
  modified_base 12: mod_base = OTHER; note = 5-methyl cytidine
  modified_base 16: mod_base = OTHER; note = 5-methyl cytidine
  modified_base 18: mod_base = OTHER; note = 5-methyl cytidine
  modified_base 20: mod_base = OTHER; note = 5-methyl cytidine
gatgcaccagtcttacacac

SEQ ID NO: 829 - RNA, 20 nt, synthetic construct
  source 1..20: mol_type = other RNA
  modified_base 1..20: mod_base = OTHER; note = Phosphorothioate linkage
  modified_base 1..20: mod_base = OTHER; note = 2'-O-(2-methoxyethyl) ribonucleotide
  modified_base 5: mod_base = OTHER; note = 5-methyl cytidine
  modified_base 7..8: mod_base = OTHER; note = 5-methyl cytidine
  modified_base 20: mod_base = OTHER; note = 5-methyl cytidine
gggacacctgtatgaatgtc

SEQ ID NO: 830 - RNA, 20 nt, synthetic construct
  source 1..20: mol_type = other RNA
  modified_base 1..20: mod_base = OTHER; note = Phosphorothioate linkage
  modified_base 1..20: mod_base = OTHER; note = 2'-O-(2-methoxyethyl) ribonucleotide
  modified_base 3: mod_base = OTHER; note = 5-methyl cytidine
  modified_base 9: mod_base = OTHER; note = 5-methyl cytidine
  modified_base 11: mod_base = OTHER; note = 5-methyl cytidine
  modified_base 13: mod_base = OTHER; note = 5-methyl cytidine
  modified_base 20: mod_base = OTHER; note = 5-methyl cytidine
ggctgtgtctcactagaagc

SEQ ID NO: 831 - RNA, 20 nt, synthetic construct
  source 1..20: mol_type = other RNA
  modified_base 1..20: mod_base = OTHER; note = Phosphorothioate linkage
  modified_base 1..20: mod_base = OTHER; note = 2'-O-(2-methoxyethyl) ribonucleotide
  modified_base 4: mod_base = OTHER; note = 5-methyl cytidine
  modified_base 7: mod_base = OTHER; note = 5-methyl cytidine
  modified_base 10: mod_base = OTHER; note = 5-methyl cytidine
  modified_base 12..15: mod_base = OTHER; note = 5-methyl cytidine
  modified_base 18..19: mod_base = OTHER; note = 5-methyl cytidine
gttcagcagcaccccttcct

SEQ ID NO: 832 - RNA, 20 nt, synthetic construct
  source 1..20: mol_type = other RNA
  modified_base 1..20: mod_base = OTHER; note = Phosphorothioate linkage
  modified_base 1..20: mod_base = OTHER; note = 2'-O-(2-methoxyethyl) ribonucleotide
  modified_base 10: mod_base = OTHER; note = 5-methyl cytidine
  modified_base 13: mod_base = OTHER; note = 5-methyl cytidine
gagggtgagctgcaatgttg

SEQ ID NO: 833 - RNA, 20 nt, synthetic construct
  source 1..20: mol_type = other RNA
  modified_base 1..20: mod_base = OTHER; note = Phosphorothioate linkage
  modified_base 1..20: mod_base = OTHER; note = 2'-O-(2-methoxyethyl) ribonucleotide
  modified_base 2: mod_base = OTHER; note = 5-methyl cytidine
  modified_base 8: mod_base = OTHER; note = 5-methyl cytidine
  modified_base 10: mod_base = OTHER; note = 5-methyl cytidine
  modified_base 13: mod_base = OTHER; note = 5-methyl cytidine
  modified_base 19: mod_base = OTHER; note = 5-methyl cytidine
gctgaagctcgtctggaaca

SEQ ID NO: 834 - RNA, 20 nt, synthetic construct
  source 1..20: mol_type = other RNA
  modified_base 1..20: mod_base = OTHER; note = Phosphorothioate linkage
  modified_base 1..20: mod_base = OTHER; note = 2'-O-(2-methoxyethyl) ribonucleotide
  modified_base 4: mod_base = OTHER; note = 5-methyl cytidine
  modified_base 10: mod_base = OTHER; note = 5-methyl cytidine
  modified_base 13: mod_base = OTHER; note = 5-methyl cytidine
  modified_base 17: mod_base = OTHER; note = 5-methyl cytidine
gttctgtgtcagctatctat

SEQ ID NO: 835 - RNA, 20 nt, synthetic construct
  source 1..20: mol_type = other RNA
  modified_base 1..20: mod_base = OTHER; note = Phosphorothioate linkage
  modified_base 1..20: mod_base = OTHER; note = 2'-O-(2-methoxyethyl) ribonucleotide
  modified_base 4: mod_base = OTHER; note = 5-methyl cytidine
  modified_base 8: mod_base = OTHER; note = 5-methyl cytidine
  modified_base 13: mod_base = OTHER; note = 5-methyl cytidine
  modified_base 15: mod_base = OTHER; note = 5-methyl cytidine
ttgcaatcgtggcgcttggg

SEQ ID NO: 836 - RNA, 20 nt, synthetic construct
  source 1..20: mol_type = other RNA
  modified_base 1..20: mod_base = OTHER; note = Phosphorothioate linkage
  modified_base 1..20: mod_base = OTHER; note = 2'-O-(2-methoxyethyl) ribonucleotide
  modified_base 1: mod_base = OTHER; note = 5-methyl cytidine
  modified_base 7: mod_base = OTHER; note = 5-methyl cytidine
  modified_base 12..14: mod_base = OTHER; note = 5-methyl cytidine
  modified_base 17: mod_base = OTHER; note = 5-methyl cytidine
  modified_base 20: mod_base = OTHER; note = 5-methyl cytidine
ctaggtctaatcccagcagc

SEQ ID NO: 837 - RNA, 20 nt, synthetic construct
  source 1..20: mol_type = other RNA
  modified_base 1..20: mod_base = OTHER; note = Phosphorothioate linkage
  modified_base 1..20: mod_base = OTHER; note = 2'-O-(2-methoxyethyl) ribonucleotide
  modified_base 1: mod_base = OTHER; note = 5-methyl cytidine
  modified_base 11: mod_base = OTHER; note = 5-methyl cytidine
  modified_base 13: mod_base = OTHER; note = 5-methyl cytidine
  modified_base 20: mod_base = OTHER; note = 5-methyl cytidine
cagttggtagcacttgtagc

SEQ ID NO: 838 - RNA, 20 nt, synthetic construct
  source 1..20: mol_type = other RNA
  modified_base 1..20: mod_base = OTHER; note = Phosphorothioate linkage
  modified_base 1..20: mod_base = OTHER; note = 2'-O-(2-methoxyethyl) ribonucleotide
  modified_base 5..8: mod_base = OTHER; note = 5-methyl cytidine
  modified_base 15: mod_base = OTHER; note = 5-methyl cytidine
  modified_base 20: mod_base = OTHER; note = 5-methyl cytidine
atttccccttgaggcagtgc

SEQ ID NO: 839 - RNA, 20 nt, synthetic construct
  source 1..20: mol_type = other RNA
  modified_base 1..20: mod_base = OTHER; note = Phosphorothioate linkage
  modified_base 1..20: mod_base = OTHER; note = 2'-O-(2-methoxyethyl) ribonucleotide
  modified_base 4: mod_base = OTHER; note = 5-methyl cytidine
  modified_base 12: mod_base = OTHER; note = 5-methyl cytidine
  modified_base 20: mod_base = OTHER; note = 5-methyl cytidine
agtcgtggtttctgggagtc

SEQ ID NO: 840 - RNA, 20 nt, synthetic construct
  source 1..20: mol_type = other RNA
  modified_base 1..20: mod_base = OTHER; note = Phosphorothioate linkage
  modified_base 1..20: mod_base = OTHER; note = 2'-O-(2-methoxyethyl) ribonucleotide
  modified_base 6: mod_base = OTHER; note = 5-methyl cytidine
  modified_base 8: mod_base = OTHER; note = 5-methyl cytidine
  modified_base 14: mod_base = OTHER; note = 5-methyl cytidine
gggtgcgctaatgctatggt

SEQ ID NO: 841 - RNA, 20 nt, synthetic construct
  source 1..20: mol_type = other RNA
  modified_base 1..20: mod_base = OTHER; note = Phosphorothioate linkage
  modified_base 1..20: mod_base = OTHER; note = 2'-O-(2-methoxyethyl) ribonucleotide
  modified_base 2..3: mod_base = OTHER; note = 5-methyl cytidine
  modified_base 10: mod_base = OTHER; note = 5-methyl cytidine
  modified_base 16..19: mod_base = OTHER; note = 5-methyl cytidine
gccattaagctgtagcccca

SEQ ID NO: 842 - RNA, 20 nt, synthetic construct
  source 1..20: mol_type = other RNA
  modified_base 1..20: mod_base = OTHER; note = Phosphorothioate linkage
  modified_base 1..20: mod_base = OTHER; note = 2'-O-(2-methoxyethyl) ribonucleotide
  modified_base 1..2: mod_base = OTHER; note = 5-methyl cytidine
  modified_base 7..8: mod_base = OTHER; note = 5-methyl cytidine
  modified_base 10: mod_base = OTHER; note = 5-methyl cytidine
  modified_base 12: mod_base = OTHER; note = 5-methyl cytidine
ccagaacctctcgtgttaga

SEQ ID NO: 843 - RNA, 20 nt, synthetic construct
  source 1..20: mol_type = other RNA
  modified_base 1..20: mod_base = OTHER; note = Phosphorothioate linkage
  modified_base 1..20: mod_base = OTHER; note = 2'-O-(2-methoxyethyl) ribonucleotide
  modified_base 11: mod_base = OTHER; note = 5-methyl cytidine
  modified_base 13: mod_base = OTHER; note = 5-methyl cytidine
  modified_base 15..17: mod_base = OTHER; note = 5-methyl cytidine
  modified_base 19..20: mod_base = OTHER; note = 5-methyl cytidine
gtgaaatatgcgctccctcc

SEQ ID NO: 844 - RNA, 20 nt, synthetic construct
  source 1..20: mol_type = other RNA
  modified_base 1..20: mod_base = OTHER; note = Phosphorothioate linkage
  modified_base 1..20: mod_base = OTHER; note = 2'-O-(2-methoxyethyl) ribonucleotide
  modified_base 16: mod_base = OTHER; note = 5-methyl cytidine
ggtggtggtatgtggctttg

SEQ ID NO: 845 - RNA, 20 nt, synthetic construct
  source 1..20: mol_type = other RNA
  modified_base 1..20: mod_base = OTHER; note = Phosphorothioate linkage
  modified_base 1..20: mod_base = OTHER; note = 2'-O-(2-methoxyethyl) ribonucleotide
  modified_base 1: mod_base = OTHER; note = 5-methyl cytidine
  modified_base 10: mod_base = OTHER; note = 5-methyl cytidine
caagataaacaaggtagggt

SEQ ID NO: 846 - DNA, 20 bp, synthetic construct
  source 1..20: mol_type = other DNA
  modified_base 1..20: mod_base = OTHER; note = Phosphorothioate linkage
  modified_base 1..5: mod_base = OTHER; note = 2'-O-(2-methoxyethyl) ribonucleotide
  misc_feature 6..7: note = DNA
  modified_base 8: mod_base = OTHER; note = 2'-O-(2-methoxyethyl) ribonucleotide
  misc_feature 9..10: note = DNA
  modified_base 11: mod_base = OTHER; note = 2'-O-(2-methoxyethyl) ribonucleotide
  misc_feature 12..13: note = DNA
  modified_base 14: mod_base = OTHER; note = 2'-O-(2-methoxyethyl) ribonucleotide
  misc_feature 15: note = DNA
  modified_base 16..20: mod_base = OTHER; note = 2'-O-(2-methoxyethyl) ribonucleotide
  modified_base 3: mod_base = OTHER; note = 5-methyl cytidine
  modified_base 5..6: mod_base = OTHER; note = 5-methyl cytidine
  modified_base 11..12: mod_base = OTHER; note = 5-methyl cytidine
  modified_base 15: mod_base = OTHER; note = 5-methyl cytidine
  modified_base 17: mod_base = OTHER; note = 5-methyl cytidine
gtctccaggtccggctcttt

SEQ ID NO: 847 - DNA, 20 bp, synthetic construct
  source 1..20: mol_type = other DNA
  modified_base 1..20: mod_base = OTHER; note = Phosphorothioate linkage
  modified_base 1..2: mod_base = OTHER; note = 2'-O-(2-methoxyethyl) ribonucleotide
  modified_base 3: mod_base = OTHER; note = locked nucleic acid
  modified_base 4..5: mod_base = OTHER; note = 2'-O-(2-methoxyethyl) ribonucleotide
  misc_feature 6..15: note = DNA
  modified_base 16..17: mod_base = OTHER; note = 2'-O-(2-methoxyethyl) ribonucleotide
  modified_base 18: mod_base = OTHER; note = locked nucleic acid
  modified_base 19..20: mod_base = OTHER; note = 2'-O-(2-methoxyethyl) ribonucleotide
  modified_base 3: mod_base = OTHER; note = 5-methyl cytidine
  modified_base 5..6: mod_base = OTHER; note = 5-methyl cytidine
  modified_base 11..12: mod_base = OTHER; note = 5-methyl cytidine
  modified_base 15: mod_base = OTHER; note = 5-methyl cytidine
  modified_base 17: mod_base = OTHER; note = 5-methyl cytidine
gtctccaggtccggctcttt

SEQ ID NO: 848 - DNA, 20 bp, synthetic construct
  source 1..20: mol_type = other DNA
  modified_base 1..20: mod_base = OTHER; note = Phosphorothioate linkage
  modified_base 1..2: mod_base = OTHER; note = 2'-O-(2-methoxyethyl) ribonucleotide
  modified_base 3: mod_base = OTHER; note = locked nucleic acid
  modified_base 4: mod_base = OTHER; note = 2'-O-(2-methoxyethyl) ribonucleotide
  modified_base 5: mod_base = OTHER; note = locked nucleic acid
  misc_feature 6..15: note = DNA
  modified_base 16: mod_base = OTHER; note = locked nucleic acid
  modified_base 17: mod_base = OTHER; note = 2'-O-(2-methoxyethyl) ribonucleotide
  modified_base 18: mod_base = OTHER; note = locked nucleic acid
  modified_base 19..20: mod_base = OTHER; note = 2'-O-(2-methoxyethyl) ribonucleotide
  modified_base 3: mod_base = OTHER; note = 5-methyl cytidine
  modified_base 5..6: mod_base = OTHER; note = 5-methyl cytidine
  modified_base 11..12: mod_base = OTHER; note = 5-methyl cytidine
  modified_base 15: mod_base = OTHER; note = 5-methyl cytidine
  modified_base 17: mod_base = OTHER; note = 5-methyl cytidine
gtctccaggtccggctcttt

SEQ ID NO: 849 - DNA, 20 bp, synthetic construct
  source 1..20: mol_type = other DNA
  modified_base 1..20: mod_base = OTHER; note = Phosphorothioate linkage
  modified_base 1: mod_base = OTHER; note = 2'-O-(2-methoxyethyl) ribonucleotide
  modified_base 2: mod_base = OTHER; note = locked nucleic acid
  modified_base 3: mod_base = OTHER; note = 2'-O-(2-methoxyethyl) ribonucleotide
  modified_base 4: mod_base = OTHER; note = locked nucleic acid
  modified_base 5: mod_base = OTHER; note = 2'-O-(2-methoxyethyl) ribonucleotide
  misc_feature 6..15: note = DNA
  modified_base 16: mod_base = OTHER; note = 2'-O-(2-methoxyethyl) ribonucleotide
  modified_base 17: mod_base = OTHER; note = locked nucleic acid
  modified_base 18: mod_base = OTHER; note = 2'-O-(2-methoxyethyl) ribonucleotide
  modified_base 19: mod_base = OTHER; note = locked nucleic acid
  modified_base 20: mod_base = OTHER; note = 2'-O-(2-methoxyethyl) ribonucleotide
  modified_base 3: mod_base = OTHER; note = 5-methyl cytidine
  modified_base 5..6: mod_base = OTHER; note = 5-methyl cytidine
  modified_base 11..12: mod_base = OTHER; note = 5-methyl cytidine
  modified_base 15: mod_base = OTHER; note = 5-methyl cytidine
  modified_base 17: mod_base = OTHER; note = 5-methyl cytidine
gtctccaggtccggctcttt

SEQ ID NO: 850 - DNA, 20 bp, synthetic construct
  source 1..20: mol_type = other DNA
  modified_base 1..20: mod_base = OTHER; note = Phosphorothioate linkage
  modified_base 1: mod_base = OTHER; note = 2'-O-(2-methoxyethyl) ribonucleotide
  modified_base 2: mod_base = OTHER; note = locked nucleic acid
  modified_base 3: mod_base = OTHER; note = 2'-O-(2-methoxyethyl) ribonucleotide
  modified_base 4: mod_base = OTHER; note = locked nucleic acid
  modified_base 5: mod_base = OTHER; note = 2'-O-(2-methoxyethyl) ribonucleotide
  misc_feature 6..7: note = DNA
  modified_base 8: mod_base = OTHER; note = 2'-O-(2-methoxyethyl) ribonucleotide
  misc_feature 9..10: note = DNA
  modified_base 11: mod_base = OTHER; note = 2'-O-(2-methoxyethyl) ribonucleotide
  misc_feature 12..13: note = DNA
  modified_base 14: mod_base = OTHER; note = 2'-O-(2-methoxyethyl) ribonucleotide
  misc_feature 15: note = DNA
  modified_base 16: mod_base = OTHER; note = 2'-O-(2-methoxyethyl) ribonucleotide
  modified_base 17: mod_base = OTHER; note = locked nucleic acid
  modified_base 18: mod_base = OTHER; note = 2'-O-(2-methoxyethyl) ribonucleotide
  modified_base 19: mod_base = OTHER; note = locked nucleic acid
  modified_base 20: mod_base = OTHER; note = 2'-O-(2-methoxyethyl) ribonucleotide
  modified_base 3: mod_base = OTHER; note = 5-methyl cytidine
  modified_base 5..6: mod_base = OTHER; note = 5-methyl cytidine
  modified_base 11..12: mod_base = OTHER; note = 5-methyl cytidine
  modified_base 15: mod_base = OTHER; note = 5-methyl cytidine
  modified_base 17: mod_base = OTHER; note = 5-methyl cytidine
gtctccaggtccggctcttt

SEQ ID NO: 851 - DNA, 20 bp, synthetic construct
  source 1..20: mol_type = other DNA
  modified_base 1..20: mod_base = OTHER; note = Phosphorothioate linkage
  modified_base 1: mod_base = OTHER; note = locked nucleic acid
  modified_base 2: mod_base = OTHER; note = 2'-O-(2-methoxyethyl) ribonucleotide
  modified_base 3: mod_base = OTHER; note = locked nucleic acid
  modified_base 4..5: mod_base = OTHER; note = 2'-O-(2-methoxyethyl) ribonucleotide
  misc_feature 6..15: note = DNA
  modified_base 16..17: mod_base = OTHER; note = 2'-O-(2-methoxyethyl) ribonucleotide
  modified_base 18: mod_base = OTHER; note = locked nucleic acid
  modified_base 19: mod_base = OTHER; note = 2'-O-(2-methoxyethyl) ribonucleotide
  modified_base 20: mod_base = OTHER; note = locked nucleic acid
  modified_base 3: mod_base = OTHER; note = 5-methyl cytidine
  modified_base 5..6: mod_base = OTHER; note = 5-methyl cytidine
  modified_base 10..11: mod_base = OTHER; note = 5-methyl cytidine
  modified_base 14: mod_base = OTHER; note = 5-methyl cytidine
  modified_base 16: mod_base = OTHER; note = 5-methyl cytidine
gtctccaggtccggctcttt

SEQ ID NO: 852 - DNA, 20 bp, synthetic construct
  source 1..20: mol_type = other DNA
  modified_base 1..3: mod_base = OTHER; note = Phosphorothioate linkage
  modified_base 5..15: mod_base = OTHER; note = Phosphorothioate linkage
  modified_base 18..20: mod_base = OTHER; note = Phosphorothioate linkage
  modified_base 1..5: mod_base = OTHER; note = 2'-O-(2-methoxyethyl) ribonucleotide
  misc_feature 6..15: note = DNA
  modified_base 16..20: mod_base = OTHER; note = 2'-O-(2-methoxyethyl) ribonucleotide
  modified_base 3: mod_base = OTHER; note = 5-methyl cytidine
  modified_base 5..6: mod_base = OTHER; note = 5-methyl cytidine
  modified_base 11..12: mod_base = OTHER; note = 5-methyl cytidine
  modified_base 15: mod_base = OTHER; note = 5-methyl cytidine
  modified_base 17: mod_base = OTHER; note = 5-methyl cytidine
gtctccaggtccggctcttt

SEQ ID NO: 853 - DNA, 20 bp, synthetic construct
  source 1..20: mol_type = other DNA
  modified_base 1..2: mod_base = OTHER; note = Phosphorothioate linkage
  modified_base 5..16: mod_base = OTHER; note = Phosphorothioate linkage
  modified_base 19..20: mod_base = OTHER; note = Phosphorothioate linkage
  modified_base 1..5: mod_base = OTHER; note = 2'-O-(2-methoxyethyl) ribonucleotide
  misc_feature 6..15: note = DNA
  modified_base 16..20: mod_base = OTHER; note = 2'-O-(2-methoxyethyl) ribonucleotide
  modified_base 3: mod_base = OTHER; note = 5-methyl cytidine
  modified_base 5..6: mod_base = OTHER; note = 5-methyl cytidine
  modified_base 11..12: mod_base = OTHER; note = 5-methyl cytidine
  modified_base 15: mod_base = OTHER; note = 5-methyl cytidine
  modified_base 17: mod_base = OTHER; note = 5-methyl cytidine
gtctccaggtccggctcttt

SEQ ID NO: 854 - DNA, 22 bp, synthetic construct
  source 1..22: mol_type = other DNA
  modified_base 1..22: mod_base = OTHER; note = Phosphorothioate linkage
  modified_base 1..6: mod_base = OTHER; note = 2'-O-(2-methoxyethyl) ribonucleotide
  misc_feature 7..16: note = DNA
  modified_base 17..22: mod_base = OTHER; note = 2'-O-(2-methoxyethyl) ribonucleotide
  modified_base 4: mod_base = OTHER; note = 5-methyl cytidine
  modified_base 6..7: mod_base = OTHER; note = 5-methyl cytidine
  modified_base 12..13: mod_base = OTHER; note = 5-methyl cytidine
  modified_base 16: mod_base = OTHER; note = 5-methyl cytidine
  modified_base 18: mod_base = OTHER; note = 5-methyl cytidine
  modified_base 22: mod_base = OTHER; note = 5-methyl cytidine
tgtctccaggtccggctctttc

SEQ ID NO: 855 - DNA, 20 bp, synthetic construct
  source 1..20: mol_type = other DNA
  modified_base 1..20: mod_base = OTHER; note = Phosphorothioate linkage
  modified_base 1..5: mod_base = OTHER; note = 2'-O-(2-methoxyethyl) ribonucleotide
  misc_feature 6..15: note = DNA
  modified_base 16..20: mod_base = OTHER; note = 2'-O-(2-methoxyethyl) ribonucleotide
  modified_base 1..2: mod_base = OTHER; note = 5-methyl cytidine
  modified_base 5: mod_base = OTHER; note = 5-methyl cytidine
  modified_base 7: mod_base = OTHER; note = 5-methyl cytidine
  modified_base 11: mod_base = OTHER; note = 5-methyl cytidine
  modified_base 13: mod_base = OTHER; note = 5-methyl cytidine
  modified_base 17: mod_base = OTHER; note = 5-methyl cytidine
ccggctctttctctttcgga

SEQ ID NO: 856 - DNA, 20 bp, synthetic construct
  source 1..20: mol_type = other DNA
  modified_base 1..20: mod_base = OTHER; note = Phosphorothioate linkage
  modified_base 1..5: mod_base = OTHER; note = 2'-O-(2-methoxyethyl) ribonucleotide
  misc_feature 6..15: note = DNA
  modified_base 16..20: mod_base = OTHER; note = 2'-O-(2-methoxyethyl) ribonucleotide
  modified_base 3..4: mod_base = OTHER; note = 5-methyl cytidine
  modified_base 7: mod_base = OTHER; note = 5-methyl cytidine
  modified_base 9: mod_base = OTHER; note = 5-methyl cytidine
  modified_base 13: mod_base = OTHER; note = 5-methyl cytidine
  modified_base 15: mod_base = OTHER; note = 5-methyl cytidine
  modified_base 19: mod_base = OTHER; note = 5-methyl cytidine
gtccggctctttctctttcg

SEQ ID NO: 857 - DNA, 20 bp, synthetic construct
  source 1..20: mol_type = other DNA
  modified_base 1..20: mod_base = OTHER; note = Phosphorothioate linkage
  modified_base 1..5: mod_base = OTHER; note = 2'-O-(2-methoxyethyl) ribonucleotide
  misc_feature 6..15: note = DNA
  modified_base 16..20: mod_base = OTHER; note = 2'-O-(2-methoxyethyl) ribonucleotide
  modified_base 5..6: mod_base = OTHER; note = 5-methyl cytidine
  modified_base 9: mod_base = OTHER; note = 5-methyl cytidine
  modified_base 15: mod_base = OTHER; note = 5-methyl cytidine
  modified_base 17: mod_base = OTHER; note = 5-methyl cytidine
aggtccggctctttctcttt

SEQ ID NO: 858 - DNA, 20 bp, synthetic construct
  source 1..20: mol_type = other DNA
  modified_base 1..20: mod_base = OTHER; note = Phosphorothioate linkage
  modified_base 1..5: mod_base = OTHER; note = 2'-O-(2-methoxyethyl) ribonucleotide
  misc_feature 6..15: note = DNA
  modified_base 16..20: mod_base = OTHER; note = 2'-O-(2-methoxyethyl) ribonucleotide
  modified_base 1..2: mod_base = OTHER; note = 5-methyl cytidine
  modified_base 7..8: mod_base = OTHER; note = 5-methyl cytidine
  modified_base 11: mod_base = OTHER; note = 5-methyl cytidine
  modified_base 13: mod_base = OTHER; note = 5-methyl cytidine
  modified_base 17: mod_base = OTHER; note = 5-methyl cytidine
  modified_base 19: mod_base = OTHER; note = 5-methyl cytidine
ccaggtccggctctttctct

SEQ ID NO: 859 - DNA, 20 bp, synthetic construct
  source 1..20: mol_type = other DNA
  modified_base 1..20: mod_base = OTHER; note = Phosphorothioate linkage
  modified_base 1..5: mod_base = OTHER; note = 2'-O-(2-methoxyethyl) ribonucleotide
  misc_feature 6..15: note = DNA
  modified_base 16..20: mod_base = OTHER; note = 2'-O-(2-methoxyethyl) ribonucleotide
  modified_base 1: mod_base = OTHER; note = 5-methyl cytidine
  modified_base 3..4: mod_base = OTHER; note = 5-methyl cytidine
  modified_base 9..10: mod_base = OTHER; note = 5-methyl cytidine
  modified_base 13: mod_base = OTHER; note = 5-methyl cytidine
  modified_base 15: mod_base = OTHER; note = 5-methyl cytidine
  modified_base 19: mod_base = OTHER; note = 5-methyl cytidine
ctccaggtccggctctttct

SEQ ID NO: 860 - DNA, 20 bp, synthetic construct
  source 1..20: mol_type = other DNA
  modified_base 1..20: mod_base = OTHER; note = Phosphorothioate linkage
  modified_base 1..5: mod_base = OTHER; note = 2'-O-(2-methoxyethyl) ribonucleotide
  misc_feature 6..15: note = DNA
  modified_base 16..20: mod_base = OTHER; note = 2'-O-(2-methoxyethyl) ribonucleotide
  modified_base 4: mod_base = OTHER; note = 5-methyl cytidine
  modified_base 6..7: mod_base = OTHER; note = 5-methyl cytidine
  modified_base 12..13: mod_base = OTHER; note = 5-methyl cytidine
  modified_base 16: mod_base = OTHER; note = 5-methyl cytidine
  modified_base 18: mod_base = OTHER; note = 5-methyl cytidine
tgtctccaggtccggctctt

SEQ ID NO: 861 - DNA, 20 bp, synthetic construct
  source 1..20: mol_type = other DNA
  modified_base 1..20: mod_base = OTHER; note = Phosphorothioate linkage
  modified_base 1..5: mod_base = OTHER; note = 2'-O-(2-methoxyethyl) ribonucleotide
  misc_feature 6..15: note = DNA
  modified_base 16..20: mod_base = OTHER; note = 2'-O-(2-methoxyethyl) ribonucleotide
  modified_base 8: mod_base = OTHER; note = 5-methyl cytidine
  modified_base 10..11: mod_base = OTHER; note = 5-methyl cytidine
  modified_base 13..16: mod_base = OTHER; note = 5-methyl cytidine
  modified_base 18: mod_base = OTHER; note = 5-methyl cytidine
  modified_base 20: mod_base = OTHER; note = 5-methyl cytidine
gtagagacacctccccgcac

SEQ ID NO: 862 - DNA, 20 bp, synthetic construct
  source 1..20: mol_type = other DNA
  modified_base 1..20: mod_base = OTHER; note = Phosphorothioate linkage
  modified_base 1..5: mod_base = OTHER; note = 2'-O-(2-methoxyethyl) ribonucleotide
  misc_feature 6..15: note = DNA
  modified_base 16..20: mod_base = OTHER; note = 2'-O-(2-methoxyethyl) ribonucleotide
  modified_base 8: mod_base = OTHER; note = 5-methyl cytidine
  modified_base 10..11: mod_base = OTHER; note = 5-methyl cytidine
  modified_base 13..16: mod_base = OTHER; note = 5-methyl cytidine
  modified_base 18: mod_base = OTHER; note = 5-methyl cytidine
  modified_base 20: mod_base = OTHER; note = 5-methyl cytidine
gtagagacacctccccgcac

SEQ ID NO: 863 - DNA, 20 bp, synthetic construct
  source 1..20: mol_type = other DNA
  modified_base 1..20: mod_base = OTHER; note = Phosphorothioate linkage
  modified_base 1..2: mod_base = OTHER; note = 2'-O-(2-methoxyethyl) ribonucleotide
  modified_base 3: mod_base = OTHER; note = locked nucleic acid
  modified_base 4: mod_base = OTHER; note = 2'-O-(2-methoxyethyl) ribonucleotide
  modified_base 5: mod_base = OTHER; note = locked nucleic acid
  misc_feature 6..15: note = DNA
  modified_base 16: mod_base = OTHER; note = locked nucleic acid
  modified_base 17: mod_base = OTHER; note = 2'-O-(2-methoxyethyl) ribonucleotide
  modified_base 18: mod_base = OTHER; note = locked nucleic acid
  modified_base 19..20: mod_base = OTHER; note = 2'-O-(2-methoxyethyl) ribonucleotide
  modified_base 8: mod_base = OTHER; note = 5-methyl cytidine
  modified_base 10..11: mod_base = OTHER; note = 5-methyl cytidine
  modified_base 13..16: mod_base = OTHER; note = 5-methyl cytidine
  modified_base 18: mod_base = OTHER; note = 5-methyl cytidine
  modified_base 20: mod_base = OTHER; note = 5-methyl cytidine
gtagagacacctccccgcac

SEQ ID NO: 864 - DNA, 20 bp, synthetic construct
  source 1..20: mol_type = other DNA
  modified_base 1..20: mod_base = OTHER; note = Phosphorothioate linkage
  modified_base 1: mod_base = OTHER; note = 2'-O-(2-methoxyethyl) ribonucleotide
  modified_base 2: mod_base = OTHER; note = locked nucleic acid
  modified_base 3: mod_base = OTHER; note = 2'-O-(2-methoxyethyl) ribonucleotide
  modified_base 4: mod_base = OTHER; note = locked nucleic acid
  modified_base 5: mod_base = OTHER; note = 2'-O-(2-methoxyethyl) ribonucleotide
  misc_feature 6..15: note = DNA
  modified_base 16: mod_base = OTHER; note = 2'-O-(2-methoxyethyl) ribonucleotide
  modified_base 17: mod_base = OTHER; note = locked nucleic acid
  modified_base 18: mod_base = OTHER; note = 2'-O-(2-methoxyethyl) ribonucleotide
  modified_base 19: mod_base = OTHER; note = locked nucleic acid
  modified_base 20: mod_base = OTHER; note = 2'-O-(2-methoxyethyl) ribonucleotide
  modified_base 8: mod_base = OTHER; note = 5-methyl cytidine
  modified_base 10..11: mod_base = OTHER; note = 5-methyl cytidine
  modified_base 13..16: mod_base = OTHER; note = 5-methyl cytidine
  modified_base 18: mod_base = OTHER; note = 5-methyl cytidine
  modified_base 20: mod_base = OTHER; note = 5-methyl cytidine
gtagagacacctccccgcac

SEQ ID NO: 865 - DNA, 20 bp, synthetic construct
  source 1..20: mol_type = other DNA
  modified_base 1..20: mod_base = OTHER; note = Phosphorothioate linkage
  modified_base 1: mod_base = OTHER; note = 2'-O-(2-methoxyethyl) ribonucleotide
  modified_base 2: mod_base = OTHER; note = locked nucleic acid
  modified_base 3: mod_base = OTHER; note = 2'-O-(2-methoxyethyl) ribonucleotide
  modified_base 4: mod_base = OTHER; note = locked nucleic acid
  modified_base 5: mod_base = OTHER; note = 2'-O-(2-methoxyethyl) ribonucleotide
  misc_feature 6..15: note = DNA
  modified_base 16: mod_base = OTHER; note = 2'-O-(2-methoxyethyl) ribonucleotide
  modified_base 17: mod_base = OTHER; note = locked nucleic acid
  modified_base 18: mod_base = OTHER; note = 2'-O-(2-methoxyethyl) ribonucleotide
  modified_base 19: mod_base = OTHER; note = locked nucleic acid
  modified_base 20: mod_base = OTHER; note = 2'-O-(2-methoxyethyl) ribonucleotide
  modified_base 8: mod_base = OTHER; note = 5-methyl cytidine
  modified_base 10..11: mod_base = OTHER; note = 5-methyl cytidine
  modified_base 13..16: mod_base = OTHER; note = 5-methyl cytidine
  modified_base 18: mod_base = OTHER; note = 5-methyl cytidine
  modified_base 20: mod_base = OTHER; note = 5-methyl cytidine
gtagagacacctccccgcac

SEQ ID NO: 866 - DNA, 20 bp, synthetic construct
  source 1..20: mol_type = other DNA
  modified_base 1..20: mod_base = OTHER; note = Phosphorothioate linkage
  modified_base 1: mod_base = OTHER; note = 2'-O-(2-methoxyethyl) ribonucleotide
  modified_base 2: mod_base = OTHER; note = locked nucleic acid
  modified_base 3: mod_base = OTHER; note = 2'-O-(2-methoxyethyl) ribonucleotide
  modified_base 4: mod_base = OTHER; note = locked nucleic acid
  modified_base 5: mod_base = OTHER; note = 2'-O-(2-methoxyethyl) ribonucleotide
  misc_feature 6..7: note = DNA
  modified_base 8: mod_base = OTHER; note = 2'-O-(2-methoxyethyl) ribonucleotide
  misc_feature 9..10: note = DNA
  modified_base 11: mod_base = OTHER; note = 2'-O-(2-methoxyethyl) ribonucleotide
  misc_feature 12..13: note = DNA
  modified_base 14: mod_base = OTHER; note = 2'-O-(2-methoxyethyl) ribonucleotide
  misc_feature 15: note = DNA
  modified_base 16: mod_base = OTHER; note = 2'-O-(2-methoxyethyl) ribonucleotide
  modified_base 17: mod_base = OTHER; note = locked nucleic acid
  modified_base 18: mod_base = OTHER; note = 2'-O-(2-methoxyethyl) ribonucleotide
  modified_base 19: mod_base = OTHER; note = locked nucleic acid
  modified_base 20: mod_base = OTHER; note = 2'-O-(2-methoxyethyl) ribonucleotide
  modified_base 8: mod_base = OTHER; note = 5-methyl cytidine
  modified_base 10..11: mod_base = OTHER; note = 5-methyl cytidine
  modified_base 13..16: mod_base = OTHER; note = 5-methyl cytidine
  modified_base 18: mod_base = OTHER; note = 5-methyl cytidine
  modified_base 20: mod_base = OTHER; note = 5-methyl cytidine
gtagagacacctccccgcac

SEQ ID NO: 867 - DNA, 20 bp, synthetic construct
  source 1..20: mol_type = other DNA
  modified_base 1..3: mod_base = OTHER; note = Phosphorothioate linkage
  modified_base 5..16: mod_base = OTHER; note = Phosphorothioate linkage
  modified_base 18..20: mod_base = OTHER; note = Phosphorothioate linkage
  modified_base 1..5: mod_base = OTHER; note = 2'-O-(2-methoxyethyl) ribonucleotide
  misc_feature 6..15: note = DNA
  modified_base 16..20: mod_base = OTHER; note = 2'-O-(2-methoxyethyl) ribonucleotide
  modified_base 8: mod_base = OTHER; note = 5-methyl cytidine
  modified_base 10..11: mod_base = OTHER; note = 5-methyl cytidine
  modified_base 13..16: mod_base = OTHER; note = 5-methyl cytidine
  modified_base 18: mod_base = OTHER; note = 5-methyl cytidine
  modified_base 20: mod_base = OTHER; note = 5-methyl cytidine
gtagagacacctccccgcac

SEQ ID NO: 868 - DNA, 20 bp, synthetic construct
  source 1..20: mol_type = other DNA
  modified_base 1..2: mod_base = OTHER; note = Phosphorothioate linkage
  modified_base 5..16: mod_base = OTHER; note = Phosphorothioate linkage
  modified_base 19..20: mod_base = OTHER; note = Phosphorothioate linkage
  modified_base 1..5: mod_base = OTHER; note = 2'-O-(2-methoxyethyl) ribonucleotide
  misc_feature 6..15: note = DNA
  modified_base 16..20: mod_base = OTHER; note = 2'-O-(2-methoxyethyl) ribonucleotide
  modified_base 8: mod_base = OTHER; note = 5-methyl cytidine
  modified_base 10..11: mod_base = OTHER; note = 5-methyl cytidine
  modified_base 13..16: mod_base = OTHER; note = 5-methyl cytidine
  modified_base 18: mod_base = OTHER; note = 5-methyl cytidine
  modified_base 20: mod_base = OTHER; note = 5-methyl cytidine
gtagagacacctccccgcac

SEQ ID NO: 869 - DNA, 22 bp, synthetic construct
  source 1..22: mol_type = other DNA
  modified_base 1..20: mod_base = OTHER; note = Phosphorothioate linkage
  modified_base 1..5: mod_base = OTHER; note = 2'-O-(2-methoxyethyl) ribonucleotide
  misc_feature 6..15: note = DNA
  modified_base 16..20: mod_base = OTHER; note = 2'-O-(2-methoxyethyl) ribonucleotide
  modified_base 9: mod_base = OTHER; note = 5-methyl cytidine
  modified_base 11..12: mod_base = OTHER; note = 5-methyl cytidine
  modified_base 14..17: mod_base = OTHER; note = 5-methyl cytidine
  modified_base 19: mod_base = OTHER; note = 5-methyl cytidine
  modified_base 21..22: mod_base = OTHER; note = 5-methyl cytidine
tgtagagacacctccccgcacc

SEQ ID NO: 870 - DNA, 20 bp, synthetic construct
  source 1..20: mol_type = other DNA
  modified_base 1..20: mod_base = OTHER; note = Phosphorothioate linkage
  modified_base 1..5: mod_base = OTHER; note = 2'-O-(2-methoxyethyl) ribonucleotide
  misc_feature 6..15: note = DNA
  modified_base 16..20: mod_base = OTHER; note = 2'-O-(2-methoxyethyl) ribonucleotide
  modified_base 7: mod_base = OTHER; note = 5-methyl cytidine
  modified_base 9..10: mod_base = OTHER; note = 5-methyl cytidine
  modified_base 12..15: mod_base = OTHER; note = 5-methyl cytidine
  modified_base 17: mod_base = OTHER; note = 5-methyl cytidine
  modified_base 19..20: mod_base = OTHER; note = 5-methyl cytidine
tagagacacctccccgcacc

SEQ ID NO: 871 - DNA, 20 bp, synthetic construct
  source 1..20: mol_type = other DNA
  modified_base 1..20: mod_base = OTHER; note = Phosphorothioate linkage
  modified_base 1..5: mod_base = OTHER; note = 2'-O-(2-methoxyethyl) ribonucleotide
  misc_feature 6..15: note = DNA
  modified_base 16..20: mod_base = OTHER; note = 2'-O-(2-methoxyethyl) ribonucleotide
  modified_base 10: mod_base = OTHER; note = 5-methyl cytidine
  modified_base 12..13: mod_base = OTHER; note = 5-methyl cytidine
  modified_base 15..18: mod_base = OTHER; note = 5-methyl cytidine
  modified_base 20: mod_base = OTHER; note = 5-methyl cytidine
ttgtagagacacctccccgc

SEQ ID NO: 872 - DNA, 20 bp, synthetic construct
  source 1..20: mol_type = other DNA
  modified_base 1..20: mod_base = OTHER; note = Phosphorothioate linkage
  modified_base 1..5: mod_base = OTHER; note = 2'-O-(2-methoxyethyl) ribonucleotide
  misc_feature 6..15: note = DNA
  modified_base 16..20: mod_base = OTHER; note = 2'-O-(2-methoxyethyl) ribonucleotide
  modified_base 13: mod_base = OTHER; note = 5-methyl cytidine
  modified_base 15..16: mod_base = OTHER; note = 5-methyl cytidine
  modified_base 18..20: mod_base = OTHER; note = 5-methyl cytidine
ttgttgtagagacacctccc

SEQ ID NO: 873 - DNA, 20 bp, synthetic construct
  source 1..20: mol_type = other DNA
  modified_base 1..20: mod_base = OTHER; note = Phosphorothioate linkage
  modified_base 1..5: mod_base = OTHER; note = 2'-O-(2-methoxyethyl) ribonucleotide
  misc_feature 6..15: note = DNA
  modified_base 16..20: mod_base = OTHER; note = 2'-O-(2-methoxyethyl) ribonucleotide
  modified_base 15: mod_base = OTHER; note = 5-methyl cytidine
  modified_base 17..18: mod_base = OTHER; note = 5-methyl cytidine
  modified_base 20: mod_base = OTHER; note = 5-methyl cytidine
agttgttgtagagacacctc

SEQ ID NO: 874 - DNA, 20 bp, synthetic construct
  source 1..20: mol_type = other DNA
  modified_base 1..20: mod_base = OTHER; note = Phosphorothioate linkage
  modified_base 1..5: mod_base = OTHER; note = 2'-O-(2-methoxyethyl) ribonucleotide
  misc_feature 6..15: note = DNA
  modified_base 16..20: mod_base = OTHER; note = 2'-O-(2-methoxyethyl) ribonucleotide
  modified_base 2: mod_base = OTHER; note = 5-methyl cytidine
  modified_base 17: mod_base = OTHER; note = 5-methyl cytidine
  modified_base 19..20: mod_base = OTHER; note = 5-methyl cytidine
gcagttgttgtagagacacc

SEQ ID NO: 875 - DNA, 20 bp, synthetic construct
  source 1..20: mol_type = other DNA
  modified_base 1..20: mod_base = OTHER; note = Phosphorothioate linkage
  modified_base 1..5: mod_base = OTHER; note = 2'-O-(2-methoxyethyl) ribonucleotide
  misc_feature 6..15: note = DNA
  modified_base 16..20: mod_base = OTHER; note = 2'-O-(2-methoxyethyl) ribonucleotide
  modified_base 2: mod_base = OTHER; note = 5-methyl cytidine
  modified_base 5: mod_base = OTHER; note = 5-methyl cytidine
  modified_base 8: mod_base = OTHER; note = 5-methyl cytidine
  modified_base 13..15: mod_base = OTHER; note = 5-methyl cytidine
  modified_base 20: mod_base = OTHER; note = 5-methyl cytidine
acatctacagtgcccggtac

SEQ ID NO: 876 - DNA, 20 bp, synthetic construct
  source 1..20: mol_type = other DNA
  modified_base 1..20: mod_base = OTHER; note = Phosphorothioate linkage
  modified_base 1..2: mod_base = OTHER; note = 2'-O-(2-methoxyethyl) ribonucleotide
  modified_base 3: mod_base = OTHER; note = locked nucleic acid
  modified_base 4..5: mod_base = OTHER; note = 2'-O-(2-methoxyethyl) ribonucleotide
  misc_feature 6..15: note = DNA
  modified_base 16..17: mod_base = OTHER; note = 2'-O-(2-methoxyethyl) ribonucleotide
  modified_base 18: mod_base = OTHER; note = locked nucleic acid
  modified_base 19..20: mod_base = OTHER; note = 2'-O-(2-methoxyethyl) ribonucleotide
  modified_base 2: mod_base = OTHER; note = 5-methyl cytidine
  modified_base 5: mod_base = OTHER; note = 5-methyl cytidine
  modified_base 8: mod_base = OTHER; note = 5-methyl cytidine
  modified_base 13..15: mod_base = OTHER; note = 5-methyl cytidine
  modified_base 20: mod_base = OTHER; note = 5-methyl cytidine
acatctacagtgcccggtac

SEQ ID NO: 877 - DNA, 20 bp, synthetic construct
  source 1..20: mol_type = other DNA
  modified_base 1..20: mod_base = OTHER; note = Phosphorothioate linkage
  modified_base 1..2: mod_base = OTHER; note = 2'-O-(2-methoxyethyl) ribonucleotide
  modified_base 3: mod_base = OTHER; note = locked nucleic acid
  modified_base 4: mod_base = OTHER; note = 2'-O-(2-methoxyethyl) ribonucleotide
  modified_base 5: mod_base = OTHER; note = locked nucleic acid
  misc_feature 6..15: note = DNA
  modified_base 16: mod_base = OTHER; note = locked nucleic acid
  modified_base 17: mod_base = OTHER; note = 2'-O-(2-methoxyethyl) ribonucleotide
  modified_base 18: mod_base = OTHER; note = locked nucleic acid
  modified_base 19..20: mod_base = OTHER; note = 2'-O-(2-methoxyethyl) ribonucleotide
  modified_base 2: mod_base = OTHER; note = 5-methyl cytidine
  modified_base 5: mod_base = OTHER; note = 5-methyl cytidine
  modified_base 8: mod_base = OTHER; note = 5-methyl cytidine
  modified_base 13..15: mod_base = OTHER; note = 5-methyl cytidine
  modified_base 20: mod_base = OTHER; note = 5-methyl cytidine
acatctacagtgcccggtac

SEQ ID NO: 878 - DNA, 20 bp, synthetic construct
  source 1..20: mol_type = other DNA
  modified_base 1..20: mod_base = OTHER; note = Phosphorothioate linkage
  modified_base 1: mod_base = OTHER; note = 2'-O-(2-methoxyethyl) ribonucleotide
  modified_base 2: mod_base = OTHER; note = locked nucleic acid
  modified_base 3: mod_base = OTHER; note = 2'-O-(2-methoxyethyl) ribonucleotide
  modified_base 4: mod_base = OTHER; note = locked nucleic acid
  modified_base 5: mod_base = OTHER; note = 2'-O-(2-methoxyethyl) ribonucleotide
  misc_feature 6..15: note = DNA
  modified_base 16: mod_base = OTHER; note = 2'-O-(2-methoxyethyl) ribonucleotide
  modified_base 17: mod_base = OTHER; note = locked nucleic acid
  modified_base 18: mod_base = OTHER; note = 2'-O-(2-methoxyethyl) ribonucleotide
  modified_base 19: mod_base = OTHER; note = locked nucleic acid
  modified_base 20: mod_base = OTHER; note = 2'-O-(2-methoxyethyl) ribonucleotide
  modified_base 2: mod_base = OTHER; note = 5-methyl cytidine
  modified_base 5: mod_base = OTHER; note = 5-methyl cytidine
  modified_base 8: mod_base = OTHER; note = 5-methyl cytidine
  modified_base 13..15: mod_base = OTHER; note = 5-methyl cytidine
  modified_base 20: mod_base = OTHER; note = 5-methyl cytidine
acatctacagtgcccggtac

SEQ ID NO: 879 - DNA, 20 bp, synthetic construct
  source 1..20: mol_type = other DNA
  modified_base 1..20: mod_base = OTHER; note = Phosphorothioate linkage
  modified_base 1: mod_base = OTHER; note = 2'-O-(2-methoxyethyl) ribonucleotide
  modified_base 2: mod_base = OTHER; note = locked nucleic acid
  modified_base 3: mod_base = OTHER; note = 2'-O-(2-methoxyethyl) ribonucleotide
  modified_base 4: mod_base = OTHER; note = locked nucleic acid
  modified_base 5: mod_base = OTHER; note = 2'-O-(2-methoxyethyl) ribonucleotide
  misc_feature 6..7: note = DNA
  modified_base 8: mod_base = OTHER; note = 2'-O-(2-methoxyethyl) ribonucleotide
  misc_feature 9..10: note = DNA
  modified_base 11: mod_base = OTHER; note = 2'-O-(2-methoxyethyl) ribonucleotide
  misc_feature 12..13: note = DNA
  modified_base 14: mod_base = OTHER; note = 2'-O-(2-methoxyethyl) ribonucleotide
  misc_feature 15: note = DNA
  modified_base 16: mod_base = OTHER; note = 2'-O-(2-methoxyethyl) ribonucleotide
  modified_base 17: mod_base = OTHER; note = locked nucleic acid
  modified_base 18: mod_base = OTHER; note = 2'-O-(2-methoxyethyl) ribonucleotide
  modified_base 19: mod_base = OTHER; note = locked nucleic acid
  modified_base 20: mod_base = OTHER; note = 2'-O-(2-methoxyethyl) ribonucleotide
  modified_base 2: mod_base = OTHER; note = 5-methyl cytidine
  modified_base 5: mod_base = OTHER; note = 5-methyl cytidine
  modified_base 8: mod_base = OTHER; note = 5-methyl cytidine
  modified_base 13..15: mod_base = OTHER; note = 5-methyl cytidine
  modified_base 20: mod_base = OTHER; note = 5-methyl cytidine
acatctacagtgcccggtac

SEQ ID NO: 880 - DNA, 20 bp, synthetic construct
  source 1..20: mol_type = other DNA
  modified_base 1..20: mod_base = OTHER; note = Phosphorothioate linkage
  modified_base 1: mod_base = OTHER; note = locked nucleic acid
  modified_base 2: mod_base = OTHER; note = 2'-O-(2-methoxyethyl) ribonucleotide
  modified_base 3: mod_base = OTHER; note = locked nucleic acid
  modified_base 4..5: mod_base = OTHER; note = 2'-O-(2-methoxyethyl) ribonucleotide
  misc_feature 6..15: note = DNA
  modified_base 16..17: mod_base = OTHER; note = 2'-O-(2-methoxyethyl) ribonucleotide
  modified_base 18: mod_base = OTHER; note = locked nucleic acid
  modified_base 19: mod_base = OTHER; note = 2'-O-(2-methoxyethyl) ribonucleotide
  modified_base 20: mod_base = OTHER; note = locked nucleic acid
  modified_base 2: mod_base = OTHER; note = 5-methyl cytidine
  modified_base 5: mod_base = OTHER; note = 5-methyl cytidine
  modified_base 8: mod_base = OTHER; note = 5-methyl cytidine
  modified_base 13..15: mod_base = OTHER; note = 5-methyl cytidine
  modified_base 20: mod_base = OTHER; note = 5-methyl cytidine
acatctacagtgcccggtac

SEQ ID NO: 881 - DNA, 20 bp, synthetic construct
  source 1..20: mol_type = other DNA
  modified_base 1..3: mod_base = OTHER; note = Phosphorothioate linkage
  modified_base 5..16: mod_base = OTHER; note = Phosphorothioate linkage
  modified_base 18..20: mod_base = OTHER; note = Phosphorothioate linkage
  modified_base 1..5: mod_base = OTHER; note = 2'-O-(2-methoxyethyl) ribonucleotide
  misc_feature 6..15: note = DNA
  modified_base 16..20: mod_base = OTHER; note = 2'-O-(2-methoxyethyl) ribonucleotide
  modified_base 2: mod_base = OTHER; note = 5-methyl cytidine
  modified_base 5: mod_base = OTHER; note = 5-methyl cytidine
  modified_base 8: mod_base = OTHER; note = 5-methyl cytidine
  modified_base 13..15: mod_base = OTHER; note = 5-methyl cytidine
  modified_base 20: mod_base = OTHER; note = 5-methyl cytidine
acatctacagtgcccggtac

SEQ ID NO: 882 - DNA, 20 bp, synthetic construct
  source 1..20: mol_type = other DNA
  modified_base 1..2: mod_base = OTHER; note = Phosphorothioate linkage
  modified_base 5..16: mod_base = OTHER; note = Phosphorothioate linkage
  modified_base 19..20: mod_base = OTHER; note = Phosphorothioate linkage
  modified_base 1..5: mod_base = OTHER; note = 2'-O-(2-methoxyethyl) ribonucleotide
  misc_feature 6..15: note = DNA
  modified_base 16..20: mod_base = OTHER; note = 2'-O-(2-methoxyethyl) ribonucleotide
  modified_base 2: mod_base = OTHER; note = 5-methyl cytidine
  modified_base 5: mod_base = OTHER; note = 5-methyl cytidine
  modified_base 8: mod_base = OTHER; note = 5-methyl cytidine
  modified_base 13..15: mod_base = OTHER; note = 5-methyl cytidine
  modified_base 20: mod_base = OTHER; note = 5-methyl cytidine
acatctacagtgcccggtac

SEQ ID NO: 883 - DNA, 22 bp, synthetic construct
  source 1..22: mol_type = other DNA
  modified_base 1..20: mod_base = OTHER; note = Phosphorothioate linkage
  modified_base 1..6: mod_base = OTHER; note = 2'-O-(2-methoxyethyl) ribonucleotide
  misc_feature 7..16: note = DNA
  modified_base 17..22: mod_base = OTHER; note = 2'-O-(2-methoxyethyl) ribonucleotide
  modified_base 1: mod_base = OTHER; note = 5-methyl cytidine
  modified_base 3: mod_base = OTHER; note = 5-methyl cytidine
  modified_base 6: mod_base = OTHER; note = 5-methyl cytidine
  modified_base 9: mod_base = OTHER; note = 5-methyl cytidine
  modified_base 14..16: mod_base = OTHER; note = 5-methyl cytidine
  modified_base 21: mod_base = OTHER; note = 5-methyl cytidine
cacatctacagtgcccggtact

SEQ ID NO: 884 - DNA, 20 bp, synthetic construct
  source 1..20: mol_type = other DNA
  modified_base 1..20: mod_base = OTHER; note = Phosphorothioate linkage
  modified_base 1..5: mod_base = OTHER; note = 2'-O-(2-methoxyethyl) ribonucleotide
  misc_feature 6..15: note = DNA
  modified_base 16..20: mod_base = OTHER; note = 2'-O-(2-methoxyethyl) ribonucleotide
  modified_base 1: mod_base = OTHER; note = 5-methyl cytidine
  modified_base 4: mod_base = OTHER; note = 5-methyl cytidine
  modified_base 9..11: mod_base = OTHER; note = 5-methyl cytidine
  modified_base 16: mod_base = OTHER; note = 5-methyl cytidine
  modified_base 18: mod_base = OTHER; note = 5-methyl cytidine
  modified_base 20: mod_base = OTHER; note = 5-methyl cytidine
ctacagtgcccggtactcgc

SEQ ID NO: 885 - DNA, 20 bp, synthetic construct
  source 1..20: mol_type = other DNA
  modified_base 1..20: mod_base = OTHER; note = Phosphorothioate linkage
  modified_base 1..5: mod_base = OTHER; note = 2'-O-(2-methoxyethyl) ribonucleotide
  misc_feature 6..15: note = DNA
  modified_base 16..20: mod_base = OTHER; note = 2'-O-(2-methoxyethyl) ribonucleotide
  modified_base 3: mod_base = OTHER; note = 5-methyl cytidine
  modified_base 6: mod_base = OTHER; note = 5-methyl cytidine
  modified_base 11..13: mod_base = OTHER; note = 5-methyl cytidine
  modified_base 18: mod_base = OTHER; note = 5-methyl cytidine
  modified_base 20: mod_base = OTHER; note = 5-methyl cytidine
atctacagtgcccggtactc

SEQ ID NO: 886 - DNA, 20 bp, synthetic construct
  source 1..20: mol_type = other DNA
  modified_base 1..20: mod_base = OTHER; note = Phosphorothioate linkage
  modified_base 1..5: mod_base = OTHER; note = 2'-O-(2-methoxyethyl) ribonucleotide
  misc_feature 6..15: note = DNA
  modified_base 16..20: mod_base = OTHER; note = 2'-O-(2-methoxyethyl) ribonucleotide
  modified_base 2: mod_base = OTHER; note = 5-methyl cytidine
  modified_base 4: mod_base = OTHER; note = 5-methyl cytidine
  modified_base 7: mod_base = OTHER; note = 5-methyl cytidine
  modified_base 10: mod_base = OTHER; note = 5-methyl cytidine
  modified_base 15..17: mod_base = OTHER; note = 5-methyl cytidine
acacatctacagtgcccggt

SEQ ID NO: 887 - DNA, 20 bp, synthetic construct
  source 1..20: mol_type = other DNA
  modified_base 1..20: mod_base = OTHER; note = Phosphorothioate linkage
  modified_base 1..5: mod_base = OTHER; note = 2'-O-(2-methoxyethyl) ribonucleotide
  misc_feature 6..15: note = DNA
  modified_base 16..20: mod_base = OTHER; note = 2'-O-(2-methoxyethyl) ribonucleotide
  modified_base 3: mod_base = OTHER; note = 5-methyl cytidine
  modified_base 5: mod_base = OTHER; note = 5-methyl cytidine
  modified_base 7: mod_base = OTHER; note = 5-methyl cytidine
  modified_base 10: mod_base = OTHER; note = 5-methyl cytidine
  modified_base 13: mod_base = OTHER; note = 5-methyl cytidine
  modified_base 18..20: mod_base = OTHER; note = 5-methyl cytidine
tacacacatctacagtgccc

SEQ ID NO: 888 - DNA, 20 bp, synthetic construct
  source 1..20: mol_type = other DNA
  modified_base 1..20: mod_base = OTHER; note = Phosphorothioate linkage
  modified_base 1..5: mod_base = OTHER; note = 2'-O-(2-methoxyethyl) ribonucleotide
  misc_feature 6..15: note = DNA
  modified_base 16..20: mod_base = OTHER; note = 2'-O-(2-methoxyethyl) ribonucleotide
  modified_base 1..2: mod_base = OTHER; note = 5-methyl cytidine
  modified_base 5: mod_base = OTHER; note = 5-methyl cytidine
  modified_base 7: mod_base = OTHER; note = 5-methyl cytidine
  modified_base 9: mod_base = OTHER; note = 5-methyl cytidine
  modified_base 12: mod_base = OTHER; note = 5-methyl cytidine
  modified_base 15: mod_base = OTHER; note = 5-methyl cytidine
  modified_base 20: mod_base = OTHER; note = 5-methyl cytidine
cctacacacatctacagtgc

SEQ ID NO: 889 - DNA, 20 bp, synthetic construct
  source 1..20: mol_type = other DNA
  modified_base 1..20: mod_base = OTHER; note = Phosphorothioate linkage
  modified_base 1..5: mod_base = OTHER; note = 2'-O-(2-methoxyethyl) ribonucleotide
  misc_feature 6..15: note = DNA
  modified_base 16..20: mod_base = OTHER; note = 2'-O-(2-methoxyethyl) ribonucleotide
  modified_base 2..4: mod_base = OTHER; note = 5-methyl cytidine
  modified_base 7: mod_base = OTHER; note = 5-methyl cytidine
  modified_base 9: mod_base = OTHER; note = 5-methyl cytidine
  modified_base 11: mod_base = OTHER; note = 5-methyl cytidine
  modified_base 14: mod_base = OTHER; note = 5-methyl cytidine
  modified_base 17: mod_base = OTHER; note = 5-methyl cytidine
tccctacacacatctacagt

SEQ ID NO: 890 - DNA, 20 bp, synthetic construct
  source 1..20: mol_type = other DNA
  modified_base 1..20: mod_base = OTHER; note = Phosphorothioate linkage
  modified_base 1..5: mod_base = OTHER; note = 2'-O-(2-methoxyethyl) ribonucleotide
  misc_feature 6..7: note = DNA
  modified_base 8: mod_base = OTHER; note = 2'-O-(2-methoxyethyl) ribonucleotide
  misc_feature 9..10: note = DNA
  modified_base 11: mod_base = OTHER; note = 2'-O-(2-methoxyethyl) ribonucleotide
  misc_feature 12..13: note = DNA
  modified_base 14: mod_base = OTHER; note = 2'-O-(2-methoxyethyl) ribonucleotide
  misc_feature 15: note = DNA
  modified_base 16..20: mod_base = OTHER; note = 2'-O-(2-methoxyethyl) ribonucleotide
  modified_base 2: mod_base = OTHER; note = 5-methyl cytidine
  modified_base 6..7: mod_base = OTHER; note = 5-methyl cytidine
  modified_base 12: mod_base = OTHER; note = 5-methyl cytidine
  modified_base 20: mod_base = OTHER; note = 5-methyl cytidine
actgtcctgaactgtatggc

SEQ ID NO: 891 - DNA, 20 bp, synthetic construct
  source 1..20: mol_type = other DNA
  modified_base 1..20: mod_base = OTHER; note = Phosphorothioate linkage
  modified_base 1..2: mod_base = OTHER; note = 2'-O-(2-methoxyethyl) ribonucleotide
  modified_base 3: mod_base = OTHER; note = locked nucleic acid
  modified_base 4..5: mod_base = OTHER; note = 2'-O-(2-methoxyethyl) ribonucleotide
  misc_feature 6..15: note = DNA
  modified_base 16..17: mod_base = OTHER; note = 2'-O-(2-methoxyethyl) ribonucleotide
  modified_base 18: mod_base = OTHER; note = locked nucleic acid
  modified_base 19..20: mod_base = OTHER; note = 2'-O-(2-methoxyethyl) ribonucleotide
  modified_base 2: mod_base = OTHER; note = 5-methyl cytidine
  modified_base 6..7: mod_base = OTHER; note = 5-methyl cytidine
  modified_base 12: mod_base = OTHER; note = 5-methyl cytidine
  modified_base 20: mod_base = OTHER; note = 5-methyl cytidine
actgtcctgaactgtatggc

SEQ ID NO: 892 - DNA, 20 bp, synthetic construct
  source 1..20: mol_type = other DNA
  modified_base 1..20: mod_base = OTHER; note = Phosphorothioate linkage
  modified_base 1..2: mod_base = OTHER; note = 2'-O-(2-methoxyethyl) ribonucleotide
  modified_base 3: mod_base = OTHER; note = locked nucleic acid
  modified_base 4: mod_base = OTHER; note = 2'-O-(2-methoxyethyl) ribonucleotide
  modified_base 5: mod_base = OTHER; note = locked nucleic acid
  misc_feature 6..15: note = DNA
  modified_base 16: mod_base = OTHER; note = locked nucleic acid
  modified_base 17: mod_base = OTHER; note = 2'-O-(2-methoxyethyl) ribonucleotide
  modified_base 18: mod_base = OTHER; note = locked nucleic acid
  modified_base 19..20: mod_base = OTHER; note = 2'-O-(2-methoxyethyl) ribonucleotide
  modified_base 2: mod_base = OTHER; note = 5-methyl cytidine
  modified_base 6..7: mod_base = OTHER; note = 5-methyl cytidine
  modified_base 12: mod_base = OTHER; note = 5-methyl cytidine
  modified_base 20: mod_base = OTHER; note = 5-methyl cytidine
actgtcctgaactgtatggc

SEQ ID NO: 893 - DNA, 20 bp, synthetic construct
  source 1..20: mol_type = other DNA
  modified_base 1..20: mod_base = OTHER; note = Phosphorothioate linkage
  modified_base 1: mod_base = OTHER; note = 2'-O-(2-methoxyethyl) ribonucleotide
  modified_base 2: mod_base = OTHER; note = locked nucleic acid
  modified_base 3: mod_base = OTHER; note = 2'-O-(2-methoxyethyl) ribonucleotide
  modified_base 4: mod_base = OTHER; note = locked nucleic acid
  modified_base 5: mod_base = OTHER; note = 2'-O-(2-methoxyethyl) ribonucleotide
  misc_feature 6..15: note = DNA
  modified_base 16: mod_base = OTHER; note = 2'-O-(2-methoxyethyl) ribonucleotide
  modified_base 17: mod_base = OTHER; note = locked nucleic acid
  modified_base 18: mod_base = OTHER; note = 2'-O-(2-methoxyethyl) ribonucleotide
  modified_base 19: mod_base = OTHER; note = locked nucleic acid
  modified_base 20: mod_base = OTHER; note = 2'-O-(2-methoxyethyl) ribonucleotide
  modified_base 2: mod_base = OTHER; note = 5-methyl cytidine
  modified_base 6..7: mod_base = OTHER; note = 5-methyl cytidine
  modified_base 12: mod_base = OTHER; note = 5-methyl cytidine
  modified_base 20: mod_base = OTHER; note = 5-methyl cytidine
actgtcctgaactgtatggc

SEQ ID NO: 894 - DNA, 20 bp, synthetic construct
  source 1..20: mol_type = other DNA
  modified_base 1..20: mod_base = OTHER; note = Phosphorothioate linkage
  modified_base 1: mod_base = OTHER; note = 2'-O-(2-methoxyethyl) ribonucleotide
  modified_base 2: mod_base = OTHER; note = locked nucleic acid
  modified_base 3: mod_base = OTHER; note = 2'-O-(2-methoxyethyl) ribonucleotide
  modified_base 4: mod_base = OTHER; note = locked nucleic acid
  modified_base 5: mod_base = OTHER; note = 2'-O-(2-methoxyethyl) ribonucleotide
  misc_feature 6..7: note = DNA
  modified_base 8: mod_base = OTHER; note = 2'-O-(2-methoxyethyl) ribonucleotide
  misc_feature 9..10: note = DNA
  modified_base 11: mod_base = OTHER; note = 2'-O-(2-methoxyethyl) ribonucleotide
  misc_feature 12..13: note = DNA
  modified_base 14: mod_base = OTHER; note = 2'-O-(2-methoxyethyl) ribonucleotide
  misc_feature 15: note = DNA
  modified_base 16: mod_base = OTHER; note = 2'-O-(2-methoxyethyl) ribonucleotide
  modified_base 17: mod_base = OTHER; note = locked nucleic acid
  modified_base 18: mod_base = OTHER; note = 2'-O-(2-methoxyethyl) ribonucleotide
  modified_base 19: mod_base = OTHER; note = locked nucleic acid
  modified_base 20: mod_base = OTHER; note = 2'-O-(2-methoxyethyl) ribonucleotide
  modified_base 2: mod_base = OTHER; note = 5-methyl cytidine
  modified_base 6..7: mod_base = OTHER; note = 5-methyl cytidine
  modified_base 12: mod_base = OTHER; note = 5-methyl cytidine
  modified_base 20: mod_base = OTHER; note = 5-methyl cytidine
actgtcctgaactgtatggc

SEQ ID NO: 895 - DNA, 20 bp, synthetic construct
  source 1..20: mol_type = other DNA
  modified_base 1..20: mod_base = OTHER; note = Phosphorothioate linkage
  modified_base 1: mod_base = OTHER; note = locked nucleic acid
  modified_base 2: mod_base = OTHER; note = 2'-O-(2-methoxyethyl) ribonucleotide
  modified_base 3: mod_base = OTHER; note = locked nucleic acid
  modified_base 4..5: mod_base = OTHER; note = 2'-O-(2-methoxyethyl) ribonucleotide
  misc_feature 6..15: note = DNA
  modified_base 16..17: mod_base = OTHER; note = 2'-O-(2-methoxyethyl) ribonucleotide
  modified_base 18: mod_base = OTHER; note = locked nucleic acid
  modified_base 19: mod_base = OTHER; note = 2'-O-(2-methoxyethyl) ribonucleotide
  modified_base 20: mod_base = OTHER; note = locked nucleic acid
  modified_base 2: mod_base = OTHER; note = 5-methyl cytidine
  modified_base 6..7: mod_base = OTHER; note = 5-methyl cytidine
  modified_base 12: mod_base = OTHER; note = 5-methyl cytidine
  modified_base 20: mod_base = OTHER; note = 5-methyl cytidine
actgtcctgaactgtatggc

SEQ ID NO: 896 - DNA, 20 bp, synthetic construct
  source 1..20: mol_type = other DNA
  modified_base 1..20: mod_base = OTHER; note = Phosphorothioate linkage
  modified_base 1..5: mod_base = OTHER; note = 2'-O-(2-methoxyethyl) ribonucleotide
  misc_feature 6..15: note = DNA
  modified_base 16..20: mod_base = OTHER; note = 2'-O-(2-methoxyethyl) ribonucleotide
  modified_base 2: mod_base = OTHER; note = 5-methyl cytidine
  modified_base 6..7: mod_base = OTHER; note = 5-methyl cytidine
  modified_base 12: mod_base = OTHER; note = 5-methyl cytidine
  modified_base 20: mod_base = OTHER; note = 5-methyl cytidine
actgtcctgaactgtatggc

SEQ ID NO: 897 - DNA, 20 bp, synthetic construct
  source 1..20: mol_type = other DNA
  modified_base 1..20: mod_base = OTHER; note = Phosphorothioate linkage
  modified_base 1..5: mod_base = OTHER; note = 2'-O-(2-methoxyethyl) ribonucleotide
  misc_feature 6..15: note = DNA
  modified_base 16..20: mod_base = OTHER; note = 2'-O-(2-methoxyethyl) ribonucleotide
  modified_base 2: mod_base = OTHER; note = 5-methyl cytidine
  modified_base 6..7: mod_base = OTHER; note = 5-methyl cytidine
  modified_base 12: mod_base = OTHER; note = 5-methyl cytidine
  modified_base 20: mod_base = OTHER; note = 5-methyl cytidine
actgtcctgaactgtatggc

SEQ ID NO: 898 - DNA, 22 bp, synthetic construct
  source 1..22: mol_type = other DNA
  modified_base 1..20: mod_base = OTHER; note = Phosphorothioate linkage
  modified_base 1..6: mod_base = OTHER; note = 2'-O-(2-methoxyethyl) ribonucleotide
  misc_feature 7..16: note = DNA
  modified_base 17..22: mod_base = OTHER; note = 2'-O-(2-methoxyethyl) ribonucleotide
  modified_base 1: mod_base = OTHER; note = 5-methyl cytidine
  modified_base 3: mod_base = OTHER; note = 5-methyl cytidine
  modified_base 7..8: mod_base = OTHER; note = 5-methyl cytidine
  modified_base 21: mod_base = OTHER; note = 5-methyl cytidine
cactgtcctgaactgtatggct

SEQ ID NO: 899 - DNA, 20 bp, synthetic construct
  source 1..20: mol_type = other DNA
  modified_base 1..20: mod_base = OTHER; note = Phosphorothioate linkage
  modified_base 1..5: mod_base = OTHER; note = 2'-O-(2-methoxyethyl) ribonucleotide
  misc_feature 6..15: note = DNA
  modified_base 16..20: mod_base = OTHER; note = 2'-O-(2-methoxyethyl) ribonucleotide
  modified_base 4..5: mod_base = OTHER; note = 5-methyl cytidine
  modified_base 10: mod_base = OTHER; note = 5-methyl cytidine
  modified_base 18: mod_base = OTHER; note = 5-methyl cytidine
tgtcctgaactgtatggctg

SEQ ID NO: 900 - DNA, 20 bp, synthetic construct
  source 1..20: mol_type = other DNA
  modified_base 1..20: mod_base = OTHER; note = Phosphorothioate linkage
  modified_base 1..5: mod_base = OTHER; note = 2'-O-(2-methoxyethyl) ribonucleotide
  misc_feature 6..15: note = DNA
  modified_base 16..20: mod_base = OTHER; note = 2'-O-(2-methoxyethyl) ribonucleotide
  modified_base 1: mod_base = OTHER; note = 5-methyl cytidine
  modified_base 3: mod_base = OTHER; note = 5-methyl cytidine
  modified_base 7..8: mod_base = OTHER; note = 5-methyl cytidine
  modified_base 13: mod_base = OTHER; note = 5-methyl cytidine
cactgtcctgaactgtatgg

SEQ ID NO: 901 - DNA, 20 bp, synthetic construct
  source 1..20: mol_type = other DNA
  modified_base 1..20: mod_base = OTHER; note = Phosphorothioate linkage
  modified_base 1..5: mod_base = OTHER; note = 2'-O-(2-methoxyethyl) ribonucleotide
  misc_feature 6..15: note = DNA
  modified_base 16..20: mod_base = OTHER; note = 2'-O-(2-methoxyethyl) ribonucleotide
  modified_base 2..4: mod_base = OTHER; note = 5-methyl cytidine
  modified_base 6: mod_base = OTHER; note = 5-methyl cytidine
  modified_base 10..11: mod_base = OTHER; note = 5-methyl cytidine
  modified_base 16: mod_base = OTHER; note = 5-methyl cytidine
tcccactgtcctgaactgta

SEQ ID NO: 902 - DNA, 20 bp, synthetic construct
  source 1..20: mol_type = other DNA
  modified_base 1..20: mod_base = OTHER; note = Phosphorothioate linkage
  modified_base 1..5: mod_base = OTHER; note = 2'-O-(2-methoxyethyl) ribonucleotide
  misc_feature 6..15: note = DNA
  modified_base 16..20: mod_base = OTHER; note = 2'-O-(2-methoxyethyl) ribonucleotide
  modified_base 1: mod_base = OTHER; note = 5-methyl cytidine
  modified_base 3..5: mod_base = OTHER; note = 5-methyl cytidine
  modified_base 7: mod_base = OTHER; note = 5-methyl cytidine
  modified_base 11..12: mod_base = OTHER; note = 5-methyl cytidine
  modified_base 17: mod_base = OTHER; note = 5-methyl cytidine
ctcccactgtcctgaactgt

SEQ ID NO: 903 - DNA, 20 bp, synthetic construct
  source 1..20: mol_type = other DNA
  modified_base 1..20: mod_base = OTHER; note = Phosphorothioate linkage
  modified_base 1..5: mod_base = OTHER; note = 2'-O-(2-methoxyethyl) ribonucleotide
  misc_feature 6..15: note = DNA
  modified_base 16..20: mod_base = OTHER; note = 2'-O-(2-methoxyethyl) ribonucleotide
  modified_base 4: mod_base = OTHER; note = 5-methyl cytidine
  modified_base 6..8: mod_base = OTHER; note = 5-methyl cytidine
  modified_base 10: mod_base = OTHER; note = 5-methyl cytidine
  modified_base 14..15: mod_base = OTHER; note = 5-methyl cytidine
  modified_base 20: mod_base = OTHER; note = 5-methyl cytidine
agactcccactgtcctgaac

SEQ ID NO: 904 - DNA, 20 bp, synthetic construct
  source 1..20: mol_type = other DNA
  modified_base 1..20: mod_base = OTHER; note = Phosphorothioate linkage
  modified_base 1..5: mod_base = OTHER; note = 2'-O-(2-methoxyethyl) ribonucleotide
  misc_feature 6..15: note = DNA
  modified_base 16..20: mod_base = OTHER; note = 2'-O-(2-methoxyethyl) ribonucleotide
  modified_base 7: mod_base = OTHER; note = 5-methyl cytidine
  modified_base 9..11: mod_base = OTHER; note = 5-methyl cytidine
  modified_base 13: mod_base = OTHER; note = 5-methyl cytidine
  modified_base 17..18: mod_base = OTHER; note = 5-methyl cytidine
gtaagactcccactgtcctg

SEQ ID NO: 905 - DNA, 20 bp, synthetic construct
  source 1..20: mol_type = other DNA
  modified_base 1..20: mod_base = OTHER; note = Phosphorothioate linkage
  modified_base 1..5: mod_base = OTHER; note = 2'-O-(2-methoxyethyl) ribonucleotide
  misc_feature 6..7: note = DNA
  modified_base 8: mod_base = OTHER; note = 2'-O-(2-methoxyethyl) ribonucleotide
  misc_feature 9..10: note = DNA
  modified_base 11: mod_base = OTHER; note = 2'-O-(2-methoxyethyl) ribonucleotide
  misc_feature 12..13: note = DNA
  modified_base 14: mod_base = OTHER; note = 2'-O-(2-methoxyethyl) ribonucleotide
  misc_feature 15: note = DNA
  modified_base 16..20: mod_base = OTHER; note = 2'-O-(2-methoxyethyl) ribonucleotide
  modified_base 11: mod_base = OTHER; note = 5-methyl cytidine
  modified_base 13: mod_base = OTHER; note = 5-methyl cytidine
  modified_base 15..17: mod_base = OTHER; note = 5-methyl cytidine
  modified_base 19..20: mod_base = OTHER; note = 5-methyl cytidine
gtgaaatatgcgctccctcc

SEQ ID NO: 906 - DNA, 20 bp, synthetic construct
  source 1..20: mol_type = other DNA
  modified_base 1..20: mod_base = OTHER; note = Phosphorothioate linkage
  modified_base 1..2: mod_base = OTHER; note = 2'-O-(2-methoxyethyl) ribonucleotide
  modified_base 3: mod_base = OTHER; note = 2'-O-(2-methoxyethyl) ribonucleotide
  modified_base 4..5: mod_base = OTHER; note = 2'-O-(2-methoxyethyl) ribonucleotide
  misc_feature 6..15: note = DNA
  modified_base 16..17: mod_base = OTHER; note = 2'-O-(2-methoxyethyl) ribonucleotide
  modified_base 18: mod_base = OTHER; note = 2'-O-(2-methoxyethyl) ribonucleotide
  modified_base 19..20: mod_base = OTHER; note = 2'-O-(2-methoxyethyl) ribonucleotide
  modified_base 11: mod_base = OTHER; note = 5-methyl cytidine
  modified_base 13: mod_base = OTHER; note = 5-methyl cytidine
  modified_base 15..17: mod_base = OTHER; note = 5-methyl cytidine
  modified_base 19..20: mod_base = OTHER; note = 5-methyl cytidine
gtgaaatatgcgctccctcc

SEQ ID NO: 907 - DNA, 20 bp, synthetic construct
  source 1..20: mol_type = other DNA
  modified_base 1..20: mod_base = OTHER; note = Phosphorothioate linkage
  modified_base 1..2: mod_base = OTHER; note = 2'-O-(2-methoxyethyl) ribonucleotide
  modified_base 3: mod_base = OTHER; note = 2'-O-(2-methoxyethyl) ribonucleotide
  modified_base 4: mod_base = OTHER; note = 2'-O-(2-methoxyethyl) ribonucleotide
  modified_base 5: mod_base = OTHER; note = 2'-O-(2-methoxyethyl) ribonucleotide
  misc_feature 6..15: note = DNA
  modified_base 16: mod_base = OTHER; note = locked nucleic acid
  modified_base 17: mod_base = OTHER; note = 2'-O-(2-methoxyethyl) ribonucleotide
  modified_base 18: mod_base = OTHER; note = locked nucleic acid
  modified_base 19..20: mod_base = OTHER; note = 2'-O-(2-methoxyethyl) ribonucleotide
  modified_base 11: mod_base = OTHER; note = 5-methyl cytidine
  modified_base 13: mod_base = OTHER; note = 5-methyl cytidine
  modified_base 15..17: mod_base = OTHER; note = 5-methyl cytidine
  modified_base 19..20: mod_base = OTHER; note = 5-methyl cytidine
gtgaaatatgcgctccctcc

SEQ ID NO: 908 - DNA, 20 bp, synthetic construct
  source 1..20: mol_type = other DNA
  modified_base 1..20: mod_base = OTHER; note = Phosphorothioate linkage
  modified_base 1: mod_base = OTHER; note = 2'-O-(2-methoxyethyl) ribonucleotide
  modified_base 2: mod_base = OTHER; note = locked nucleic acid
  modified_base 3: mod_base = OTHER; note = 2'-O-(2-methoxyethyl) ribonucleotide
  modified_base 4: mod_base = OTHER; note = locked nucleic acid
  modified_base 5: mod_base = OTHER; note = 2'-O-(2-methoxyethyl) ribonucleotide
  misc_feature 6..15: note = DNA
  modified_base 16: mod_base = OTHER; note = 2'-O-(2-methoxyethyl) ribonucleotide
  modified_base 17: mod_base = OTHER; note = locked nucleic acid
  modified_base 18: mod_base = OTHER; note = 2'-O-(2-methoxyethyl) ribonucleotide
  modified_base 19: mod_base = OTHER; note = locked nucleic acid
  modified_base 20: mod_base = OTHER; note = 2'-O-(2-methoxyethyl) ribonucleotide
  modified_base 11: mod_base = OTHER; note = 5-methyl cytidine
  modified_base 13: mod_base = OTHER; note = 5-methyl cytidine
  modified_base 15..17: mod_base = OTHER; note = 5-methyl cytidine
  modified_base 19..20: mod_base = OTHER; note = 5-methyl cytidine
gtgaaatatgcgctccctcc

SEQ ID NO: 909 - DNA, 20 bp, synthetic construct
  source 1..20: mol_type = other DNA
  modified_base 1..20: mod_base = OTHER; note = Phosphorothioate linkage
  modified_base 1: mod_base = OTHER; note = 2'-O-(2-methoxyethyl) ribonucleotide
  modified_base 2: mod_base = OTHER; note = locked nucleic acid
  modified_base 3: mod_base = OTHER; note = 2'-O-(2-methoxyethyl) ribonucleotide
  modified_base 4: mod_base = OTHER; note = locked nucleic acid
  modified_base 5: mod_base = OTHER; note = 2'-O-(2-methoxyethyl) ribonucleotide
  misc_feature 6..7: note = DNA
  modified_base 8: mod_base = OTHER; note = 2'-O-(2-methoxyethyl) ribonucleotide
  misc_feature 9..10: note = DNA
  modified_base 11: mod_base = OTHER; note = 2'-O-(2-methoxyethyl) ribonucleotide
  misc_feature 12..13: note = DNA
  modified_base 14: mod_base = OTHER; note = 2'-O-(2-methoxyethyl) ribonucleotide
  misc_feature 15: note = DNA
  modified_base 16: mod_base = OTHER; note = 2'-O-(2-methoxyethyl) ribonucleotide
  modified_base 17: mod_base = OTHER; note = locked nucleic acid
  modified_base 18: mod_base = OTHER; note = 2'-O-(2-methoxyethyl) ribonucleotide
  modified_base 19: mod_base = OTHER; note = locked nucleic acid
  modified_base 20: mod_base = OTHER; note = 2'-O-(2-methoxyethyl) ribonucleotide
  modified_base 11: mod_base = OTHER; note = 5-methyl cytidine
  modified_base 13: mod_base = OTHER; note = 5-methyl cytidine
  modified_base 15..17: mod_base = OTHER; note = 5-methyl cytidine
  modified_base 19..20: mod_base = OTHER; note = 5-methyl cytidine
gtgaaatatgcgctccctcc

SEQ ID NO: 910 - DNA, 20 bp, synthetic construct
  source 1..20: mol_type = other DNA
  modified_base 1..20: mod_base = OTHER; note = Phosphorothioate linkage
  modified_base 1: mod_base = OTHER; note = locked nucleic acid
  modified_base 2: mod_base = OTHER; note = 2'-O-(2-methoxyethyl) ribonucleotide
  modified_base 3: mod_base = OTHER; note = locked nucleic acid
  modified_base 4..5: mod_base = OTHER; note = 2'-O-(2-methoxyethyl) ribonucleotide
  misc_feature 6..15: note = DNA
  modified_base 16..17: mod_base = OTHER; note = 2'-O-(2-methoxyethyl) ribonucleotide
  modified_base 18: mod_base = OTHER; note = locked nucleic acid
  modified_base 19..20: mod_base = OTHER; note = 2'-O-(2-methoxyethyl) ribonucleotide
  modified_base 11: mod_base = OTHER; note = 5-methyl cytidine
  modified_base 13: mod_base = OTHER; note = 5-methyl cytidine
  modified_base 15..17: mod_base = OTHER; note = 5-methyl cytidine
  modified_base 19..20: mod_base = OTHER; note = 5-methyl cytidine
gtgaaatatgcgctccctcc

SEQ ID NO: 911 - DNA, 20 bp, synthetic construct
  source 1..20: mol_type = other DNA
  modified_base 1..3: mod_base = OTHER; note = Phosphorothioate linkage
  modified_base 5..16: mod_base = OTHER; note = Phosphorothioate linkage
  modified_base 18..20: mod_base = OTHER; note = Phosphorothioate linkage
  modified_base 1..5: mod_base = OTHER; note = 2'-O-(2-methoxyethyl) ribonucleotide
  misc_feature 6..15: note = DNA
  modified_base 16..20: mod_base = OTHER; note = 2'-O-(2-methoxyethyl) ribonucleotide
  modified_base 11: mod_base = OTHER; note = 5-methyl cytidine
  modified_base 13: mod_base = OTHER; note = 5-methyl cytidine
  modified_base 15..17: mod_base = OTHER; note = 5-methyl cytidine
  modified_base 19..20: mod_base = OTHER; note = 5-methyl cytidine
gtgaaatatgcgctccctcc

SEQ ID NO: 912 - DNA, 20 bp, synthetic construct
  source 1..20: mol_type = other DNA
  modified_base 1..2: mod_base = OTHER; note = Phosphorothioate linkage
  modified_base 5..16: mod_base = OTHER; note = Phosphorothioate linkage
  modified_base 19..20: mod_base = OTHER; note = Phosphorothioate linkage
  modified_base 1..5: mod_base = OTHER; note = 2'-O-(2-methoxyethyl) ribonucleotide
  misc_feature 6..15: note = DNA
  modified_base 16..20: mod_base = OTHER; note = 2'-O-(2-methoxyethyl) ribonucleotide
  modified_base 11: mod_base = OTHER; note = 5-methyl cytidine
  modified_base 13: mod_base = OTHER; note = 5-methyl cytidine
  modified_base 15..17: mod_base = OTHER; note = 5-methyl cytidine
  modified_base 19..20: mod_base = OTHER; note = 5-methyl cytidine
gtgaaatatgcgctccctcc

SEQ ID NO: 913 - DNA, 22 bp, synthetic construct
  source 1..22: mol_type = other DNA
  modified_base 1..22: mod_base = OTHER; note = Phosphorothioate linkage
  modified_base 1..6: mod_base = OTHER; note = 2'-O-(2-methoxyethyl) ribonucleotide
  misc_feature 7..16: note = DNA
  modified_base 17..22: mod_base = OTHER; note = 2'-O-(2-methoxyethyl) ribonucleotide
  modified_base 12: mod_base = OTHER; note = 5-methyl cytidine
  modified_base 14: mod_base = OTHER; note = 5-methyl cytidine
  modified_base 16..18: mod_base = OTHER; note = 5-methyl cytidine
  modified_base 20..21: mod_base = OTHER; note = 5-methyl cytidine
tgtgaaatatgcgctccctcct

SEQ ID NO: 914 - DNA, 20 bp, synthetic construct
  source 1..20: mol_type = other DNA
  modified_base 1..20: mod_base = OTHER; note = Phosphorothioate linkage
  modified_base 1..5: mod_base = OTHER; note = 2'-O-(2-methoxyethyl) ribonucleotide
  misc_feature 6..15: note = DNA
  modified_base 16..20: mod_base = OTHER; note = 2'-O-(2-methoxyethyl) ribonucleotide
  modified_base 5: mod_base = OTHER; note = 5-methyl cytidine
  modified_base 7: mod_base = OTHER; note = 5-methyl cytidine
  modified_base 9..11: mod_base = OTHER; note = 5-methyl cytidine
  modified_base 13..14: mod_base = OTHER; note = 5-methyl cytidine
  modified_base 17: mod_base = OTHER; note = 5-methyl cytidine
tatgcgctccctccttcaga

SEQ ID NO: 915 - DNA, 20 bp, synthetic construct
  source 1..20: mol_type = other DNA
  modified_base 1..20: mod_base = OTHER; note = Phosphorothioate linkage
  modified_base 1..5: mod_base = OTHER; note = 2'-O-(2-methoxyethyl) ribonucleotide
  misc_feature 6..15: note = DNA
  modified_base 16..20: mod_base = OTHER; note = 2'-O-(2-methoxyethyl) ribonucleotide
  modified_base 7: mod_base = OTHER; note = 5-methyl cytidine
  modified_base 9: mod_base = OTHER; note = 5-methyl cytidine
  modified_base 11..13: mod_base = OTHER; note = 5-methyl cytidine
  modified_base 15..16: mod_base = OTHER; note = 5-methyl cytidine
  modified_base 19: mod_base = OTHER; note = 5-methyl cytidine
aatatgcgctccctccttca

SEQ ID NO: 916 - DNA, 20 bp, synthetic construct
  source 1..20: mol_type = other DNA
  modified_base 1..20: mod_base = OTHER; note = Phosphorothioate linkage
  modified_base 1..5: mod_base = OTHER; note = 2'-O-(2-methoxyethyl) ribonucleotide
  misc_feature 6..15: note = DNA
  modified_base 16..20: mod_base = OTHER; note = 2'-O-(2-methoxyethyl) ribonucleotide
  modified_base 9: mod_base = OTHER; note = 5-methyl cytidine
  modified_base 11: mod_base = OTHER; note = 5-methyl cytidine
  modified_base 13..15: mod_base = OTHER; note = 5-methyl cytidine
  modified_base 17..18: mod_base = OTHER; note = 5-methyl cytidine
gaaatatgcgctccctcctt

SEQ ID NO: 917 - DNA, 20 bp, synthetic construct
  source 1..20: mol_type = other DNA
  modified_base 1..20: mod_base = OTHER; note = Phosphorothioate linkage
  modified_base 1..5: mod_base = OTHER; note = 2'-O-(2-methoxyethyl) ribonucleotide
  misc_feature 6..15: note = DNA
  modified_base 16..20: mod_base = OTHER; note = 2'-O-(2-methoxyethyl) ribonucleotide
  modified_base 1: mod_base = OTHER; note = 5-methyl cytidine
  modified_base 13: mod_base = OTHER; note = 5-methyl cytidine
  modified_base 15: mod_base = OTHER; note = 5-methyl cytidine
  modified_base 17..19: mod_base = OTHER; note = 5-methyl cytidine
ctgtgaaatatgcgctccct

SEQ ID NO: 918 - DNA, 20 bp, synthetic construct
  source 1..20: mol_type = other DNA
  modified_base 1..20: mod_base = OTHER; note = Phosphorothioate linkage
  modified_base 1..5: mod_base = OTHER; note = 2'-O-(2-methoxyethyl) ribonucleotide
  misc_feature 6..15: note = DNA
  modified_base 16..20: mod_base = OTHER; note = 2'-O-(2-methoxyethyl) ribonucleotide
  modified_base 3: mod_base = OTHER; note = 5-methyl cytidine
  modified_base 15: mod_base = OTHER; note = 5-methyl cytidine
  modified_base 17: mod_base = OTHER; note = 5-methyl cytidine
  modified_base 19..20: mod_base = OTHER; note = 5-methyl cytidine
ttctgtgaaatatgcgctcc

SEQ ID NO: 919 - DNA, 20 bp, synthetic construct
  source 1..20: mol_type = other DNA
  modified_base 1..20: mod_base = OTHER; note = Phosphorothioate linkage
  modified_base 1..5: mod_base = OTHER; note = 2'-O-(2-methoxyethyl) ribonucleotide
  misc_feature 6..15: note = DNA
  modified_base 16..20: mod_base = OTHER; note = 2'-O-(2-methoxyethyl) ribonucleotide
  modified_base 5: mod_base = OTHER; note = 5-methyl cytidine
  modified_base 17: mod_base = OTHER; note = 5-methyl cytidine
  modified_base 19: mod_base = OTHER; note = 5-methyl cytidine
tgttctgtgaaatatgcgct

SEQ ID NO: 920 - DNA, 20 bp, synthetic construct
  source 1..20: mol_type = other DNA
  modified_base 1..20: mod_base = OTHER; note = Phosphorothioate linkage
  modified_base 1..5: mod_base = OTHER; note = 2'-O-(2-methoxyethyl) ribonucleotide
  misc_feature 6..15: note = DNA
  modified_base 16..20: mod_base = OTHER; note = 2'-O-(2-methoxyethyl) ribonucleotide
  modified_base 7: mod_base = OTHER; note = 5-methyl cytidine
  modified_base 19: mod_base = OTHER; note = 5-methyl cytidine
gttgttctgtgaaatatgcg

SEQ ID NO: 921 - RNA, 20 nt, synthetic construct
  source 1..20: mol_type = other RNA
  modified_base 1..20: mod_base = OTHER; note = Phosphorothioate linkage
  modified_base 1..2: mod_base = OTHER; note = 2'-O-(2-methoxyethyl) ribonucleotide
  modified_base 3: mod_base = OTHER; note = Locked nucleic acid
  modified_base 4..5: mod_base = OTHER; note = 2'-O-(2-methoxyethyl) ribonucleotide
  modified_base 6: mod_base = OTHER; note = Locked nucleic acid
  modified_base 7..8: mod_base = OTHER; note = 2'-O-(2-methoxyethyl) ribonucleotide
  modified_base 9: mod_base = OTHER; note = Locked nucleic acid
  modified_base 10..11: mod_base = OTHER; note = 2'-O-(2-methoxyethyl) ribonucleotide
  modified_base 12: mod_base = OTHER; note = Locked nucleic acid
  modified_base 13..14: mod_base = OTHER; note = 2'-O-(2-methoxyethyl) ribonucleotide
  modified_base 15: mod_base = OTHER; note = Locked nucleic acid
  modified_base 16..17: mod_base = OTHER; note = 2'-O-(2-methoxyethyl) ribonucleotide
  modified_base 18: mod_base = OTHER; note = Locked nucleic acid
  modified_base 19..20: mod_base = OTHER; note = 2'-O-(2-methoxyethyl) ribonucleotide
  modified_base 14: mod_base = OTHER; note = 5-methyl cytidine
  modified_base 19: mod_base = OTHER; note = 5-methyl cytidine
tagtggaagatgtcggagct

SEQ ID NO: 922 - RNA, 20 nt, synthetic construct
  source 1..20: mol_type = other RNA
  modified_base 1..20: mod_base = OTHER; note = Phosphorothioate linkage
  modified_base 1..4: mod_base = OTHER; note = 2'-O-(2-methoxyethyl) ribonucleotide
  modified_base 5: mod_base = OTHER; note = Locked nucleic acid
  modified_base 6..8: mod_base = OTHER; note = 2'-O-(2-methoxyethyl) ribonucleotide
  modified_base 9: mod_base = OTHER; note = Locked nucleic acid
  modified_base 10..12: mod_base = OTHER; note = 2'-O-(2-methoxyethyl) ribonucleotide
  modified_base 13: mod_base = OTHER; note = Locked nucleic acid
  modified_base 14..16: mod_base = OTHER; note = 2'-O-(2-methoxyethyl) ribonucleotide
  modified_base 17: mod_base = OTHER; note = Locked nucleic acid
  modified_base 18..20: mod_base = OTHER; note = 2'-O-(2-methoxyethyl) ribonucleotide
  modified_base 14: mod_base = OTHER; note = 5-methyl cytidine
  modified_base 19: mod_base = OTHER; note = 5-methyl cytidine
tagtggaagatgtcggagct

SEQ ID NO: 923 - RNA, 20 nt, synthetic construct
  source 1..20: mol_type = other RNA
  modified_base 1..20: mod_base = OTHER; note = Phosphorothioate linkage
  modified_base 1..3: mod_base = OTHER; note = 2'-O-(2-methoxyethyl) ribonucleotide
  modified_base 4: mod_base = OTHER; note = Locked nucleic acid
  modified_base 5..7: mod_base = OTHER; note = 2'-O-(2-methoxyethyl) ribonucleotide
  modified_base 8: mod_base = OTHER; note = Locked nucleic acid
  modified_base 9..11: mod_base = OTHER; note = 2'-O-(2-methoxyethyl) ribonucleotide
  modified_base 12: mod_base = OTHER; note = Locked nucleic acid
  modified_base 13..15: mod_base = OTHER; note = 2'-O-(2-methoxyethyl) ribonucleotide
  modified_base 16: mod_base = OTHER; note = Locked nucleic acid
  modified_base 17..20: mod_base = OTHER; note = 2'-O-(2-methoxyethyl) ribonucleotide
  modified_base 14: mod_base = OTHER; note = 5-methyl cytidine
  modified_base 19: mod_base = OTHER; note = 5-methyl cytidine
tagtggaagatgtcggagct

SEQ ID NO: 924 - RNA, 20 nt, synthetic construct
  source 1..20: mol_type = other RNA
  modified_base 1..20: mod_base = OTHER; note = Phosphorothioate linkage
  modified_base 1: mod_base = OTHER; note = 2'-O-(2-methoxyethyl) ribonucleotide
  modified_base 2: mod_base = OTHER; note = Locked nucleic acid
  modified_base 3..4: mod_base = OTHER; note = 2'-O-(2-methoxyethyl) ribonucleotide
  modified_base 5: mod_base = OTHER; note = Locked nucleic acid
  modified_base 6..7: mod_base = OTHER; note = 2'-O-(2-methoxyethyl) ribonucleotide
  modified_base 8: mod_base = OTHER; note = Locked nucleic acid
  modified_base 9..10: mod_base = OTHER; note = 2'-O-(2-methoxyethyl) ribonucleotide
  modified_base 11: mod_base = OTHER; note = Locked nucleic acid
  modified_base 12..13: mod_base = OTHER; note = 2'-O-(2-methoxyethyl) ribonucleotide
  modified_base 14: mod_base = OTHER; note = Locked nucleic acid
  modified_base 15..16: mod_base = OTHER; note = 2'-O-(2-methoxyethyl) ribonucleotide
  modified_base 17: mod_base = OTHER; note = Locked nucleic acid
  modified_base 18..19: mod_base = OTHER; note = 2'-O-(2-methoxyethyl) ribonucleotide
  modified_base 20: mod_base = OTHER; note = Locked nucleic acid
  modified_base 14: mod_base = OTHER; note = 5-methyl cytidine
  modified_base 19: mod_base = OTHER; note = 5-methyl cytidine
tagtggaagatgtcggagct

SEQ ID NO: 925 - RNA, 20 nt, synthetic construct
  source 1..20: mol_type = other RNA
  modified_base 1..20: mod_base = OTHER; note = Phosphorothioate linkage
  modified_base 1: mod_base = OTHER; note = Locked nucleic acid
  modified_base 2..3: mod_base = OTHER; note = 2'-O-(2-methoxyethyl) ribonucleotide
  modified_base 4: mod_base = OTHER; note = Locked nucleic acid
  modified_base 5..6: mod_base = OTHER; note = 2'-O-(2-methoxyethyl) ribonucleotide
  modified_base 7: mod_base = OTHER; note = Locked nucleic acid
  modified_base 8..9: mod_base = OTHER; note = 2'-O-(2-methoxyethyl) ribonucleotide
  modified_base 10: mod_base = OTHER; note = Locked nucleic acid
  modified_base 11..12: mod_base = OTHER; note = 2'-O-(2-methoxyethyl) ribonucleotide
  modified_base 13: mod_base = OTHER; note = Locked nucleic acid
  modified_base 14..15: mod_base = OTHER; note = 2'-O-(2-methoxyethyl) ribonucleotide
  modified_base 16: mod_base = OTHER; note = Locked nucleic acid
  modified_base 17..18: mod_base = OTHER; note = 2'-O-(2-methoxyethyl) ribonucleotide
  modified_base 19: mod_base = OTHER; note = Locked nucleic acid
  modified_base 20: mod_base = OTHER; note = 2'-O-(2-methoxyethyl) ribonucleotide
  modified_base 14: mod_base = OTHER; note = 5-methyl cytidine
  modified_base 19: mod_base = OTHER; note = 5-methyl cytidine
tagtggaagatgtcggagct

SEQ ID NO: 926 - DNA, 20 bp, synthetic construct
  source 1..20: mol_type = other DNA
  modified_base 1..20: mod_base = OTHER; note = Phosphorothioate linkage
  modified_base 1..5: mod_base = OTHER; note = 2'-O-(2-methoxyethyl) ribonucleotide
  misc_feature 6..7: note = DNA
  modified_base 8: mod_base = OTHER; note = 2'-O-(2-methoxyethyl) ribonucleotide
  misc_feature 9..10: note = DNA
  modified_base 11: mod_base = OTHER; note = 2'-O-(2-methoxyethyl) ribonucleotide
  misc_feature 12..13: note = DNA
  modified_base 14: mod_base = OTHER; note = 2'-O-(2-methoxyethyl) ribonucleotide
  misc_feature 15: note = DNA
  modified_base 16..20: mod_base = OTHER; note = 2'-O-(2-methoxyethyl) ribonucleotide
  modified_base 14: mod_base = OTHER; note = 5-methyl cytidine
  modified_base 19: mod_base = OTHER; note = 5-methyl cytidine
tagtggaagatgtcggagct

SEQ ID NO: 927 - RNA, 20 nt, synthetic construct
  source 1..20: mol_type = other RNA
  modified_base 1..3: mod_base = OTHER; note = Phosphorothioate linkage
  modified_base 5..16: mod_base = OTHER; note = Phosphorothioate linkage
  modified_base 18..20: mod_base = OTHER; note = Phosphorothioate linkage
  modified_base 1..20: mod_base = OTHER; note = 2'-O-(2-methoxyethyl) ribonucleotide
  modified_base 14: mod_base = OTHER; note = 5-methyl cytidine
  modified_base 19: mod_base = OTHER; note = 5-methyl cytidine
tagtggaagatgtcggagct

SEQ ID NO: 928 - RNA, 20 nt, synthetic construct
  source 1..20: mol_type = other RNA
  modified_base 1..2: mod_base = OTHER; note = Phosphorothioate linkage
  modified_base 5..16: mod_base = OTHER; note = Phosphorothioate linkage
  modified_base 19..20: mod_base = OTHER; note = Phosphorothioate linkage
  modified_base 1..20: mod_base = OTHER; note = 2'-O-(2-methoxyethyl) ribonucleotide
  modified_base 14: mod_base = OTHER; note = 5-methyl cytidine
  modified_base 19: mod_base = OTHER; note = 5-methyl cytidine
tagtggaagatgtcggagct

SEQ ID NO: 929 - RNA, 22 nt, synthetic construct
  source 1..22: mol_type = other RNA
  modified_base 1..20: mod_base = OTHER; note = Phosphorothioate linkage
  modified_base 1..22: mod_base = OTHER; note = 2'-O-(2-methoxyethyl) ribonucleotide
  modified_base 1: mod_base = OTHER; note = 5-methyl cytidine
  modified_base 15: mod_base = OTHER; note = 5-methyl cytidine
  modified_base 20: mod_base = OTHER; note = 5-methyl cytidine
ctagtggaagatgtcggagcta

SEQ ID NO: 930 - RNA, 20 nt, synthetic construct
  source 1..20: mol_type = other RNA
  modified_base 1..20: mod_base = OTHER; note = Phosphorothioate linkage
  modified_base 1..20: mod_base = OTHER; note = 2'-O-(2-methoxyethyl) ribonucleotide
  modified_base 10: mod_base = OTHER; note = 5-methyl cytidine
  modified_base 15: mod_base = OTHER; note = 5-methyl cytidine
ggaagatgtcggagctaggg

SEQ ID NO: 931 - RNA, 20 nt, synthetic construct
  source 1..20: mol_type = other RNA
  modified_base 1..20: mod_base = OTHER; note = Phosphorothioate linkage
  modified_base 1..20: mod_base = OTHER; note = 2'-O-(2-methoxyethyl) ribonucleotide
  modified_base 12: mod_base = OTHER; note = 5-methyl cytidine
  modified_base 17: mod_base = OTHER; note = 5-methyl cytidine
gtggaagatgtcggagctag

SEQ ID NO: 932 - RNA, 20 nt, synthetic construct
  source 1..20: mol_type = other RNA
  modified_base 1..20: mod_base = OTHER; note = Phosphorothioate linkage
  modified_base 1..20: mod_base = OTHER; note = 2'-O-(2-methoxyethyl) ribonucleotide
  modified_base 1..2: mod_base = OTHER; note = 5-methyl cytidine
  modified_base 16: mod_base = OTHER; note = 5-methyl cytidine
cctagtggaagatgtcggag

SEQ ID NO: 933 - RNA, 20 nt, synthetic construct
  source 1..20: mol_type = other RNA
  modified_base 1..20: mod_base = OTHER; note = Phosphorothioate linkage
  modified_base 1..20: mod_base = OTHER; note = 2'-O-(2-methoxyethyl) ribonucleotide
  modified_base 1: mod_base = OTHER; note = 5-methyl cytidine
  modified_base 3..4: mod_base = OTHER; note = 5-methyl cytidine
  modified_base 18: mod_base = OTHER; note = 5-methyl cytidine
cacctagtggaagatgtcgg

SEQ ID NO: 934 - RNA, 20 nt, synthetic construct
  source 1..20: mol_type = other RNA
  modified_base 1..20: mod_base = OTHER; note = Phosphorothioate linkage
  modified_base 1..2: mod_base = OTHER; note = 2'-O-(2-methoxyethyl) ribonucleotide
  modified_base 3: mod_base = OTHER; note = Locked nucleic acid
  modified_base 4..5: mod_base = OTHER; note = 2'-O-(2-methoxyethyl) ribonucleotide
  modified_base 6: mod_base = OTHER; note = Locked nucleic acid
  modified_base 7..8: mod_base = OTHER; note = 2'-O-(2-methoxyethyl) ribonucleotide
  modified_base 9: mod_base = OTHER; note = Locked nucleic acid
  modified_base 10..11: mod_base = OTHER; note = 2'-O-(2-methoxyethyl) ribonucleotide
  modified_base 12: mod_base = OTHER; note = Locked nucleic acid
  modified_base 13..14: mod_base = OTHER; note = 2'-O-(2-methoxyethyl) ribonucleotide
  modified_base 15: mod_base = OTHER; note = Locked nucleic acid
  modified_base 16..17: mod_base = OTHER; note = 2'-O-(2-methoxyethyl) ribonucleotide
  modified_base 18: mod_base = OTHER; note = Locked nucleic acid
  modified_base 19..20: mod_base = OTHER; note = 2'-O-(2-methoxyethyl) ribonucleotide
  modified_base 2: mod_base = OTHER; note = 5-methyl cytidine
  modified_base 4..5: mod_base = OTHER; note = 5-methyl cytidine
  modified_base 7: mod_base = OTHER; note = 5-methyl cytidine
  modified_base 9: mod_base = OTHER; note = 5-methyl cytidine
  modified_base 14..15: mod_base = OTHER; note = 5-methyl cytidine
  modified_base 19: mod_base = OTHER; note = 5-methyl cytidine
gctcctctcttgtccgtact

SEQ ID NO: 935 - RNA, 20 nt, synthetic construct
  source 1..20: mol_type = other RNA
  modified_base 1..20: mod_base = OTHER; note = Phosphorothioate linkage
  modified_base 1..4: mod_base = OTHER; note = 2'-O-(2-methoxyethyl) ribonucleotide
  modified_base 5: mod_base = OTHER; note = Locked nucleic acid
  modified_base 6..8: mod_base = OTHER; note = 2'-O-(2-methoxyethyl) ribonucleotide
  modified_base 9: mod_base = OTHER; note = Locked nucleic acid
  modified_base 10..12: mod_base = OTHER; note = 2'-O-(2-methoxyethyl) ribonucleotide
  modified_base 13: mod_base = OTHER; note = Locked nucleic acid
  modified_base 14..16: mod_base = OTHER; note = 2'-O-(2-methoxyethyl) ribonucleotide
  modified_base 17: mod_base = OTHER; note = Locked nucleic acid
  modified_base 18..20: mod_base = OTHER; note = 2'-O-(2-methoxyethyl) ribonucleotide
  modified_base 2: mod_base = OTHER; note = 5-methyl cytidine
  modified_base 4..5: mod_base = OTHER; note = 5-methyl cytidine
  modified_base 7: mod_base = OTHER; note = 5-methyl cytidine
  modified_base 9: mod_base = OTHER; note = 5-methyl cytidine
  modified_base 14..15: mod_base = OTHER; note = 5-methyl cytidine
  modified_base 19: mod_base = OTHER; note = 5-methyl cytidine
gctcctctcttgtccgtact

SEQ ID NO: 936 - RNA, 20 nt, synthetic construct
  source 1..20: mol_type = other RNA
  modified_base 1..20: mod_base = OTHER; note = Phosphorothioate linkage
  modified_base 1..3: mod_base = OTHER; note = 2'-O-(2-methoxyethyl) ribonucleotide
  modified_base 4: mod_base = OTHER; note = Locked nucleic acid
  modified_base 5..7: mod_base = OTHER; note = 2'-O-(2-methoxyethyl) ribonucleotide
  modified_base 8: mod_base = OTHER; note = Locked nucleic acid
  modified_base 9..11: mod_base = OTHER; note = 2'-O-(2-methoxyethyl) ribonucleotide
  modified_base 12: mod_base = OTHER; note = Locked nucleic acid
  modified_base 13..15: mod_base = OTHER; note = 2'-O-(2-methoxyethyl) ribonucleotide
  modified_base 16: mod_base = OTHER; note = Locked nucleic acid
  modified_base 17..20: mod_base = OTHER; note = 2'-O-(2-methoxyethyl) ribonucleotide
  modified_base 2: mod_base = OTHER; note = 5-methyl cytidine
  modified_base 4..5: mod_base = OTHER; note = 5-methyl cytidine
  modified_base 7: mod_base = OTHER; note = 5-methyl cytidine
  modified_base 9: mod_base = OTHER; note = 5-methyl cytidine
  modified_base 14..15: mod_base = OTHER; note = 5-methyl cytidine
  modified_base 19: mod_base = OTHER; note = 5-methyl cytidine
gctcctctcttgtccgtact

SEQ ID NO: 937 - RNA, 20 nt, synthetic construct
  source 1..20: mol_type = other RNA
  modified_base 1..20: mod_base = OTHER; note = Phosphorothioate linkage
  modified_base 1: mod_base = OTHER; note = 2'-O-(2-methoxyethyl) ribonucleotide
  modified_base 2: mod_base = OTHER; note = Locked nucleic acid
  modified_base 3..4: mod_base = OTHER; note = 2'-O-(2-methoxyethyl) ribonucleotide
  modified_base 5: mod_base = OTHER; note = Locked nucleic acid
  modified_base 6..7: mod_base = OTHER; note = 2'-O-(2-methoxyethyl) ribonucleotide
  modified_base 8: mod_base = OTHER; note = Locked nucleic acid
  modified_base 9..10: mod_base = OTHER; note = 2'-O-(2-methoxyethyl) ribonucleotide
  modified_base 11: mod_base = OTHER; note = Locked nucleic acid
  modified_base 12..13: mod_base = OTHER; note = 2'-O-(2-methoxyethyl) ribonucleotide
  modified_base 14: mod_base = OTHER; note = Locked nucleic acid
  modified_base 15..16: mod_base = OTHER; note = 2'-O-(2-methoxyethyl) ribonucleotide
  modified_base 17: mod_base = OTHER; note = Locked nucleic acid
  modified_base 18..19: mod_base = OTHER; note = 2'-O-(2-methoxyethyl) ribonucleotide
  modified_base 20: mod_base = OTHER; note = Locked nucleic acid
  modified_base 2: mod_base = OTHER; note = 5-methyl cytidine
  modified_base 4..5: mod_base = OTHER; note = 5-methyl cytidine
  modified_base 7: mod_base = OTHER; note = 5-methyl cytidine
  modified_base 9: mod_base = OTHER; note = 5-methyl cytidine
  modified_base 14..15: mod_base = OTHER; note = 5-methyl cytidine
  modified_base 19: mod_base = OTHER; note = 5-methyl cytidine
gctcctctcttgtccgtact

SEQ ID NO: 938 - RNA, 20 nt, synthetic construct
  source 1..20: mol_type = other RNA
  modified_base 1..20: mod_base = OTHER; note = Phosphorothioate linkage
  modified_base 1: mod_base = OTHER; note = Locked nucleic acid
  modified_base 2..3: mod_base = OTHER; note = 2'-O-(2-methoxyethyl) ribonucleotide
  modified_base 4: mod_base = OTHER; note = Locked nucleic acid
  modified_base 5..6: mod_base = OTHER; note = 2'-O-(2-methoxyethyl) ribonucleotide
  modified_base 7: mod_base = OTHER; note = Locked nucleic acid
  modified_base 8..9: mod_base = OTHER; note = 2'-O-(2-methoxyethyl) ribonucleotide
  modified_base 10: mod_base = OTHER; note = Locked nucleic acid
  modified_base 11..12: mod_base = OTHER; note = 2'-O-(2-methoxyethyl) ribonucleotide
  modified_base 13: mod_base = OTHER; note = Locked nucleic acid
  modified_base 14..15: mod_base = OTHER; note = 2'-O-(2-methoxyethyl) ribonucleotide
  modified_base 16: mod_base = OTHER; note = Locked nucleic acid
  modified_base 17..18: mod_base = OTHER; note = 2'-O-(2-methoxyethyl) ribonucleotide
  modified_base 19: mod_base = OTHER; note = Locked nucleic acid
  modified_base 20: mod_base = OTHER; note = 2'-O-(2-methoxyethyl) ribonucleotide
  modified_base 2: mod_base = OTHER; note = 5-methyl cytidine
  modified_base 4..5: mod_base = OTHER; note = 5-methyl cytidine
  modified_base 7: mod_base = OTHER; note = 5-methyl cytidine
  modified_base 9: mod_base = OTHER; note = 5-methyl cytidine
  modified_base 14..15: mod_base = OTHER; note = 5-methyl cytidine
  modified_base 19: mod_base = OTHER; note = 5-methyl cytidine
gctcctctcttgtccgtact

SEQ ID NO: 939 - DNA, 20 bp, synthetic construct
  source 1..20: mol_type = other DNA
  modified_base 1..20: mod_base = OTHER; note = Phosphorothioate linkage
  modified_base 1..5: mod_base = OTHER; note = 2'-O-(2-methoxyethyl) ribonucleotide
  misc_feature 6..7: note = DNA
  modified_base 8: mod_base = OTHER; note = 2'-O-(2-methoxyethyl) ribonucleotide
  misc_feature 9..10: note = DNA
  modified_base 11: mod_base = OTHER; note = 2'-O-(2-methoxyethyl) ribonucleotide
  misc_feature 12..13: note = DNA
  modified_base 14: mod_base = OTHER; note = 2'-O-(2-methoxyethyl) ribonucleotide
  misc_feature 15: note = DNA
  modified_base 16..20: mod_base = OTHER; note = 2'-O-(2-methoxyethyl) ribonucleotide
  modified_base 2: mod_base = OTHER; note = 5-methyl cytidine
  modified_base 4..5: mod_base = OTHER; note = 5-methyl cytidine
  modified_base 7: mod_base = OTHER; note = 5-methyl cytidine
  modified_base 9: mod_base = OTHER; note = 5-methyl cytidine
  modified_base 14..15: mod_base = OTHER; note = 5-methyl cytidine
  modified_base 19: mod_base = OTHER; note = 5-methyl cytidine
gctcctctcttgtccgtact

SEQ ID NO: 940 - RNA, 20 nt, synthetic construct
  source 1..20: mol_type = other RNA
  modified_base 1..3: mod_base = OTHER; note = Phosphorothioate linkage
  modified_base 5..16: mod_base = OTHER; note = Phosphorothioate linkage
  modified_base 18..20: mod_base = OTHER; note = Phosphorothioate linkage
  modified_base 1..20: mod_base = OTHER; note = 2'-O-(2-methoxyethyl) ribonucleotide
  modified_base 2: mod_base = OTHER; note = 5-methyl cytidine
  modified_base 4..5: mod_base = OTHER; note = 5-methyl cytidine
  modified_base 7: mod_base = OTHER; note = 5-methyl cytidine
  modified_base 9: mod_base = OTHER; note = 5-methyl cytidine
  modified_base 14..15: mod_base = OTHER; note = 5-methyl cytidine
  modified_base 19: mod_base = OTHER; note = 5-methyl cytidine
gctcctctcttgtccgtact

SEQ ID NO: 941 - RNA, 20 nt, synthetic construct
  source 1..20: mol_type = other RNA
  modified_base 1..2: mod_base = OTHER; note = Phosphorothioate linkage
  modified_base 5..16: mod_base = OTHER; note = Phosphorothioate linkage
  modified_base 19..20: mod_base = OTHER; note = Phosphorothioate linkage
  modified_base 1..20: mod_base = OTHER; note = 2'-O-(2-methoxyethyl) ribonucleotide
  modified_base 2: mod_base = OTHER; note = 5-methyl cytidine
  modified_base 4..5: mod_base = OTHER; note = 5-methyl cytidine
  modified_base 7: mod_base = OTHER; note = 5-methyl cytidine
  modified_base 9: mod_base = OTHER; note = 5-methyl cytidine
  modified_base 14..15: mod_base = OTHER; note = 5-methyl cytidine
  modified_base 19: mod_base = OTHER; note = 5-methyl cytidine
gctcctctcttgtccgtact

SEQ ID NO: 942 - RNA, 22 nt, synthetic construct
  source 1..22: mol_type = other RNA
  modified_base 1..20: mod_base = OTHER; note = Phosphorothioate linkage
  modified_base 1..22: mod_base = OTHER; note = 2'-O-(2-methoxyethyl) ribonucleotide
  modified_base 3: mod_base = OTHER; note = 5-methyl cytidine
  modified_base 5..6: mod_base = OTHER; note = 5-methyl cytidine
  modified_base 8: mod_base = OTHER; note = 5-methyl cytidine
  modified_base 10: mod_base = OTHER; note = 5-methyl cytidine
  modified_base 15..16: mod_base = OTHER; note = 5-methyl cytidine
  modified_base 20: mod_base = OTHER; note = 5-methyl cytidine
agctcctctcttgtccgtactt

SEQ ID NO: 943 - RNA, 20 nt, synthetic construct
  source 1..20: mol_type = other RNA
  modified_base 1..20: mod_base = OTHER; note = Phosphorothioate linkage
  modified_base 1..20: mod_base = OTHER; note = 2'-O-(2-methoxyethyl) ribonucleotide
  modified_base 1: mod_base = OTHER; note = 5-methyl cytidine
  modified_base 3: mod_base = OTHER; note = 5-methyl cytidine
  modified_base 5: mod_base = OTHER; note = 5-methyl cytidine
  modified_base 10..11: mod_base = OTHER; note = 5-methyl cytidine
  modified_base 15: mod_base = OTHER; note = 5-methyl cytidine
  modified_base 18..20: mod_base = OTHER; note = 5-methyl cytidine
ctctcttgtccgtacttccc

SEQ ID NO: 944 - RNA, 20 nt, synthetic construct
  source 1..20: mol_type = other RNA
  modified_base 1..20: mod_base = OTHER; note = Phosphorothioate linkage
  modified_base 1..20: mod_base = OTHER; note = 2'-O-(2-methoxyethyl) ribonucleotide
  modified_base 2..3: mod_base = OTHER; note = 5-methyl cytidine
  modified_base 5: mod_base = OTHER; note = 5-methyl cytidine
  modified_base 7: mod_base = OTHER; note = 5-methyl cytidine
  modified_base 12..13: mod_base = OTHER; note = 5-methyl cytidine
  modified_base 17: mod_base = OTHER; note = 5-methyl cytidine
  modified_base 20: mod_base = OTHER; note = 5-methyl cytidine
tcctctcttgtccgtacttc

SEQ ID NO: 945 - RNA, 20 nt, synthetic construct
  source 1..20: mol_type = other RNA
  modified_base 1..20: mod_base = OTHER; note = Phosphorothioate linkage
  modified_base 1..20: mod_base = OTHER; note = 2'-O-(2-methoxyethyl) ribonucleotide
  modified_base 1: mod_base = OTHER; note = 5-methyl cytidine
  modified_base 4: mod_base = OTHER; note = 5-methyl cytidine
  modified_base 6..7: mod_base = OTHER; note = 5-methyl cytidine
  modified_base 9: mod_base = OTHER; note = 5-methyl cytidine
  modified_base 11: mod_base = OTHER; note = 5-methyl cytidine
  modified_base 16..17: mod_base = OTHER; note = 5-methyl cytidine
cagctcctctcttgtccgta

SEQ ID NO: 946 - RNA, 20 nt, synthetic construct
  source 1..20: mol_type = other RNA
  modified_base 1..20: mod_base = OTHER; note = Phosphorothioate linkage
  modified_base 1..20: mod_base = OTHER; note = 2'-O-(2-methoxyethyl) ribonucleotide
  modified_base 2..3: mod_base = OTHER; note = 5-methyl cytidine
  modified_base 6: mod_base = OTHER; note = 5-methyl cytidine
  modified_base 8..9: mod_base = OTHER; note = 5-methyl cytidine
  modified_base 11: mod_base = OTHER; note = 5-methyl cytidine
  modified_base 13: mod_base = OTHER; note = 5-methyl cytidine
  modified_base 18..19: mod_base = OTHER; note = 5-methyl cytidine
gccagctcctctcttgtccg

SEQ ID NO: 947 - RNA, 20 nt, synthetic construct
  source 1..20: mol_type = other RNA
  modified_base 1..20: mod_base = OTHER; note = Phosphorothioate linkage
  modified_base 1..20: mod_base = OTHER; note = 2'-O-(2-methoxyethyl) ribonucleotide
  modified_base 6..7: mod_base = OTHER; note = 5-methyl cytidine
  modified_base 9..12: mod_base = OTHER; note = 5-methyl cytidine
  modified_base 14: mod_base = OTHER; note = 5-methyl cytidine
  modified_base 16: mod_base = OTHER; note = 5-methyl cytidine
aggaaccaccccactcttgg

SEQ ID NO: 948 - RNA, 20 nt, synthetic construct
  source 1..20: mol_type = other RNA
  modified_base 1..20: mod_base = OTHER; note = Phosphorothioate linkage
  modified_base 1..2: mod_base = OTHER; note = 2'-O-(2-methoxyethyl) ribonucleotide
  modified_base 3: mod_base = OTHER; note = Locked nucleic acid
  modified_base 4..5: mod_base = OTHER; note = 2'-O-(2-methoxyethyl) ribonucleotide
  modified_base 6: mod_base = OTHER; note = Locked nucleic acid
  modified_base 7..8: mod_base = OTHER; note = 2'-O-(2-methoxyethyl) ribonucleotide
  modified_base 9: mod_base = OTHER; note = Locked nucleic acid
  modified_base 10..11: mod_base = OTHER; note = 2'-O-(2-methoxyethyl) ribonucleotide
  modified_base 12: mod_base = OTHER; note = Locked nucleic acid
  modified_base 13..14: mod_base = OTHER; note = 2'-O-(2-methoxyethyl) ribonucleotide
  modified_base 15: mod_base = OTHER; note = Locked nucleic acid
  modified_base 16..17: mod_base = OTHER; note = 2'-O-(2-methoxyethyl) ribonucleotide
  modified_base 18: mod_base = OTHER; note = Locked nucleic acid
  modified_base 19..20: mod_base = OTHER; note = 2'-O-(2-methoxyethyl) ribonucleotide
  modified_base 1..3: mod_base = OTHER; note = 5-methyl cytidine
  modified_base 5..6: mod_base = OTHER; note = 5-methyl cytidine
  modified_base 8: mod_base = OTHER; note = 5-methyl cytidine
  modified_base 11: mod_base = OTHER; note = 5-methyl cytidine
  modified_base 17: mod_base = OTHER; note = 5-methyl cytidine
cccgcctctacgtagacaag

SEQ ID NO: 949 - RNA, 20 nt, synthetic construct
  source 1..20: mol_type = other RNA
  modified_base 1..20: mod_base = OTHER; note = Phosphorothioate linkage
  modified_base 1..4: mod_base = OTHER; note = 2'-O-(2-methoxyethyl) ribonucleotide
  modified_base 5: mod_base = OTHER; note = Locked nucleic acid
  modified_base 6..8: mod_base = OTHER; note = 2'-O-(2-methoxyethyl) ribonucleotide
  modified_base 9: mod_base = OTHER; note = Locked nucleic acid
  modified_base 10..12: mod_base = OTHER; note = 2'-O-(2-methoxyethyl) ribonucleotide
  modified_base 13: mod_base = OTHER; note = Locked nucleic acid
  modified_base 14..16: mod_base = OTHER; note = 2'-O-(2-methoxyethyl) ribonucleotide
  modified_base 17: mod_base = OTHER; note = Locked nucleic acid
  modified_base 18..20: mod_base = OTHER; note = 2'-O-(2-methoxyethyl) ribonucleotide
  modified_base 1..3: mod_base = OTHER; note = 5-methyl cytidine
  modified_base 5..6: mod_base = OTHER; note = 5-methyl cytidine
  modified_base 8: mod_base = OTHER; note = 5-methyl cytidine
  modified_base 11: mod_base = OTHER; note = 5-methyl cytidine
  modified_base 17: mod_base = OTHER; note = 5-methyl cytidine
cccgcctctacgtagacaag

SEQ ID NO: 950 - RNA, 20 nt, synthetic construct
  source 1..20: mol_type = other RNA
  modified_base 1..20: mod_base = OTHER; note = Phosphorothioate linkage
  modified_base 1..3: mod_base = OTHER; note = 2'-O-(2-methoxyethyl) ribonucleotide
  modified_base 4: mod_base = OTHER; note = Locked nucleic acid
  modified_base 5..7: mod_base = OTHER; note = 2'-O-(2-methoxyethyl) ribonucleotide
  modified_base 8: mod_base = OTHER; note = Locked nucleic acid
  modified_base 9..11: mod_base = OTHER; note = 2'-O-(2-methoxyethyl) ribonucleotide
  modified_base 12: mod_base = OTHER; note = Locked nucleic acid
  modified_base 13..15: mod_base = OTHER; note = 2'-O-(2-methoxyethyl) ribonucleotide
  modified_base 16: mod_base = OTHER; note = Locked nucleic acid
  modified_base 17..20: mod_base = OTHER; note = 2'-O-(2-methoxyethyl) ribonucleotide
  modified_base 1..3: mod_base = OTHER; note = 5-methyl cytidine
  modified_base 5..6: mod_base = OTHER; note = 5-methyl cytidine
  modified_base 8: mod_base = OTHER; note = 5-methyl cytidine
  modified_base 11: mod_base = OTHER; note = 5-methyl cytidine
  modified_base 17: mod_base = OTHER; note = 5-methyl cytidine
cccgcctctacgtagacaag

SEQ ID NO: 951 - RNA, 20 nt, synthetic construct
  source 1..20: mol_type = other RNA
  modified_base 1..20: mod_base = OTHER; note = Phosphorothioate linkage
  modified_base 1: mod_base = OTHER; note = 2'-O-(2-methoxyethyl) ribonucleotide
  modified_base 2: mod_base = OTHER; note = Locked nucleic acid
  modified_base 3..4: mod_base = OTHER; note = 2'-O-(2-methoxyethyl) ribonucleotide
  modified_base 5: mod_base = OTHER; note = Locked nucleic acid
  modified_base 6..7: mod_base = OTHER; note = 2'-O-(2-methoxyethyl) ribonucleotide
  modified_base 8: mod_base = OTHER; note = Locked nucleic acid
  modified_base 9..10: mod_base = OTHER; note = 2'-O-(2-methoxyethyl) ribonucleotide
  modified_base 11: mod_base = OTHER; note = Locked nucleic acid
  modified_base 12..13: mod_base = OTHER; note = 2'-O-(2-methoxyethyl) ribonucleotide
  modified_base 14: mod_base = OTHER; note = Locked nucleic acid
  modified_base 15..16: mod_base = OTHER; note = 2'-O-(2-methoxyethyl) ribonucleotide
  modified_base 17: mod_base = OTHER; note = Locked nucleic acid
  modified_base 18..19: mod_base = OTHER; note = 2'-O-(2-methoxyethyl) ribonucleotide
  modified_base 20: mod_base = OTHER; note = Locked nucleic acid
  modified_base 1..3: mod_base = OTHER; note = 5-methyl cytidine
  modified_base 5..6: mod_base = OTHER; note = 5-methyl cytidine
  modified_base 8: mod_base = OTHER; note = 5-methyl cytidine
  modified_base 11: mod_base = OTHER; note = 5-methyl cytidine
  modified_base 17: mod_base = OTHER; note = 5-methyl cytidine
cccgcctctacgtagacaag

SEQ ID NO: 952 - RNA, 20 nt, synthetic construct
  source 1..20: mol_type = other RNA
  modified_base 1..20: mod_base = OTHER; note = Phosphorothioate linkage
  modified_base 1: mod_base = OTHER; note = Locked nucleic acid
  modified_base 2..3: mod_base = OTHER; note = 2'-O-(2-methoxyethyl) ribonucleotide
  modified_base 4: mod_base = OTHER; note = Locked nucleic acid
  modified_base 5..6: mod_base = OTHER; note = 2'-O-(2-methoxyethyl) ribonucleotide
  modified_base 7: mod_base = OTHER; note = Locked nucleic acid
  modified_base 8..9: mod_base = OTHER; note = 2'-O-(2-methoxyethyl) ribonucleotide
  modified_base 10: mod_base = OTHER; note = Locked nucleic acid
  modified_base 11..12: mod_base = OTHER; note = 2'-O-(2-methoxyethyl) ribonucleotide
  modified_base 13: mod_base = OTHER; note = Locked nucleic acid
  modified_base 14..15: mod_base = OTHER; note = 2'-O-(2-methoxyethyl) ribonucleotide
  modified_base 16: mod_base = OTHER; note = Locked nucleic acid
  modified_base 17..18: mod_base = OTHER; note = 2'-O-(2-methoxyethyl) ribonucleotide
  modified_base 19: mod_base = OTHER; note = Locked nucleic acid
  modified_base 20: mod_base = OTHER; note = 2'-O-(2-methoxyethyl) ribonucleotide
  modified_base 1..3: mod_base = OTHER; note = 5-methyl cytidine
  modified_base 5..6: mod_base = OTHER; note = 5-methyl cytidine
  modified_base 8: mod_base = OTHER; note = 5-methyl cytidine
  modified_base 11: mod_base = OTHER; note = 5-methyl cytidine
  modified_base 17: mod_base = OTHER; note = 5-methyl cytidine
cccgcctctacgtagacaag

SEQ ID NO: 953 - DNA, 20 bp, synthetic construct
  source 1..20: mol_type = other DNA
  modified_base 1..20: mod_base = OTHER; note = Phosphorothioate linkage
  modified_base 1..5: mod_base = OTHER; note = 2'-O-(2-methoxyethyl) ribonucleotide
  misc_feature 6..7: note = DNA
  modified_base 8: mod_base = OTHER; note = 2'-O-(2-methoxyethyl) ribonucleotide
  misc_feature 9..10: note = DNA
  modified_base 11: mod_base = OTHER; note = 2'-O-(2-methoxyethyl) ribonucleotide
  misc_feature 12..13: note = DNA
  modified_base 14: mod_base = OTHER; note = 2'-O-(2-methoxyethyl) ribonucleotide
  misc_feature 15: note = DNA
  modified_base 16..20: mod_base = OTHER; note = 2'-O-(2-methoxyethyl) ribonucleotide
  modified_base 1..3: mod_base = OTHER; note = 5-methyl cytidine
  modified_base 5..6: mod_base = OTHER; note = 5-methyl cytidine
  modified_base 8: mod_base = OTHER; note = 5-methyl cytidine
  modified_base 11: mod_base = OTHER; note = 5-methyl cytidine
  modified_base 17: mod_base = OTHER; note = 5-methyl cytidine
cccgcctctacgtagacaag

SEQ ID NO: 954 - RNA, 20 nt, synthetic construct
  source 1..20: mol_type = other RNA
  modified_base 1..3: mod_base = OTHER; note = Phosphorothioate linkage
  modified_base 5..16: mod_base = OTHER; note = Phosphorothioate linkage
  modified_base 18..20: mod_base = OTHER; note = Phosphorothioate linkage
  modified_base 1..20: mod_base = OTHER; note = 2'-O-(2-methoxyethyl) ribonucleotide
  modified_base 1..3: mod_base = OTHER; note = 5-methyl cytidine
  modified_base 5..6: mod_base = OTHER; note = 5-methyl cytidine
  modified_base 8: mod_base = OTHER; note = 5-methyl cytidine
  modified_base 11: mod_base = OTHER; note = 5-methyl cytidine
  modified_base 17: mod_base = OTHER; note = 5-methyl cytidine
cccgcctctacgtagacaag

SEQ ID NO: 955 - RNA, 20 nt, synthetic construct
  source 1..20: mol_type = other RNA
  modified_base 1..2: mod_base = OTHER; note = Phosphorothioate linkage
  modified_base 5..16: mod_base = OTHER; note = Phosphorothioate linkage
  modified_base 19..20: mod_base = OTHER; note = Phosphorothioate linkage
  modified_base 1..20: mod_base = OTHER; note = 2'-O-(2-methoxyethyl) ribonucleotide
  modified_base 1..3: mod_base = OTHER; note = 5-methyl cytidine
  modified_base 5..6: mod_base = OTHER; note = 5-methyl cytidine
  modified_base 8: mod_base = OTHER; note = 5-methyl cytidine
  modified_base 11: mod_base = OTHER; note = 5-methyl cytidine
  modified_base 17: mod_base = OTHER; note = 5-methyl cytidine
cccgcctctacgtagacaag

SEQ ID NO: 956 - RNA, 22 nt, synthetic construct
  source 1..22: mol_type = other RNA
  modified_base 1..20: mod_base = OTHER; note = Phosphorothioate linkage
  modified_base 1..20: mod_base = OTHER; note = 2'-O-(2-methoxyethyl) ribonucleotide
  modified_base 2..4: mod_base = OTHER; note = 5-methyl cytidine
  modified_base 6..7: mod_base = OTHER; note = 5-methyl cytidine
  modified_base 9: mod_base = OTHER; note = 5-methyl cytidine
  modified_base 12: mod_base = OTHER; note = 5-methyl cytidine
  modified_base 18: mod_base = OTHER; note = 5-methyl cytidine
tcccgcctctacgtagacaagt

SEQ ID NO: 957 - RNA, 20 nt, synthetic construct
  source 1..20: mol_type = other RNA
  modified_base 1..20: mod_base = OTHER; note = Phosphorothioate linkage
  modified_base 1..20: mod_base = OTHER; note = 2'-O-(2-methoxyethyl) ribonucleotide
  modified_base 2: mod_base = OTHER; note = 5-methyl cytidine
  modified_base 5: mod_base = OTHER; note = 5-methyl cytidine
  modified_base 11: mod_base = OTHER; note = 5-methyl cytidine
  modified_base 18..19: mod_base = OTHER; note = 5-methyl cytidine
tctacgtagacaagtaacca

SEQ ID NO: 958 - RNA, 20 nt, synthetic construct
  source 1..20: mol_type = other RNA
  modified_base 1..20: mod_base = OTHER; note = Phosphorothioate linkage
  modified_base 1..20: mod_base = OTHER; note = 2'-O-(2-methoxyethyl) ribonucleotide
  modified_base 1..2: mod_base = OTHER; note = 5-methyl cytidine
  modified_base 4: mod_base = OTHER; note = 5-methyl cytidine
  modified_base 7: mod_base = OTHER; note = 5-methyl cytidine
  modified_base 13: mod_base = OTHER; note = 5-methyl cytidine
  modified_base 20: mod_base = OTHER; note = 5-methyl cytidine
cctctacgtagacaagtaac

SEQ ID NO: 959 - RNA, 20 nt, synthetic construct
  source 1..20: mol_type = other RNA
  modified_base 1..20: mod_base = OTHER; note = Phosphorothioate linkage
  modified_base 1..20: mod_base = OTHER; note = 2'-O-(2-methoxyethyl) ribonucleotide
  modified_base 1: mod_base = OTHER; note = 5-methyl cytidine
  modified_base 3..4: mod_base = OTHER; note = 5-methyl cytidine
  modified_base 6: mod_base = OTHER; note = 5-methyl cytidine
  modified_base 9: mod_base = OTHER; note = 5-methyl cytidine
  modified_base 15: mod_base = OTHER; note = 5-methyl cytidine
cgcctctacgtagacaagta

SEQ ID NO: 960 - RNA, 20 nt, synthetic construct
  source 1..20: mol_type = other RNA
  modified_base 1..20: mod_base = OTHER; note = Phosphorothioate linkage
  modified_base 1..20: mod_base = OTHER; note = 2'-O-(2-methoxyethyl) ribonucleotide
  modified_base 3..5: mod_base = OTHER; note = 5-methyl cytidine
  modified_base 7..8: mod_base = OTHER; note = 5-methyl cytidine
  modified_base 10: mod_base = OTHER; note = 5-methyl cytidine
  modified_base 13: mod_base = OTHER; note = 5-methyl cytidine
  modified_base 19: mod_base = OTHER; note = 5-methyl cytidine
gtcccgcctctacgtagaca

SEQ ID NO: 961 - RNA, 20 nt, synthetic construct
  source 1..20: mol_type = other RNA
  modified_base 1..20: mod_base = OTHER; note = Phosphorothioate linkage
  modified_base 1..20: mod_base = OTHER; note = 2'-O-(2-methoxyethyl) ribonucleotide
  modified_base 5..7: mod_base = OTHER; note = 5-methyl cytidine
  modified_base 9..10: mod_base = OTHER; note = 5-methyl cytidine
  modified_base 12: mod_base = OTHER; note = 5-methyl cytidine
  modified_base 15: mod_base = OTHER; note = 5-methyl cytidine
gagtcccgcctctacgtaga

SEQ ID NO: 962 - RNA, 20 nt, synthetic construct
  source 1..20: mol_type = other RNA
  modified_base 1..20: mod_base = OTHER; note = Phosphorothioate linkage
  modified_base 1..20: mod_base = OTHER; note = 2'-O-(2-methoxyethyl) ribonucleotide
  modified_base 7..9: mod_base = OTHER; note = 5-methyl cytidine
  modified_base 11..12: mod_base = OTHER; note = 5-methyl cytidine
  modified_base 14: mod_base = OTHER; note = 5-methyl cytidine
  modified_base 17: mod_base = OTHER; note = 5-methyl cytidine
gagagtcccgcctctacgta

SEQ ID NO: 963 - RNA, 20 nt, synthetic construct
  source 1..20: mol_type = other RNA
  modified_base 1..20: mod_base = OTHER; note = Phosphorothioate linkage
  modified_base 1..20: mod_base = OTHER; note = 2'-O-(2-methoxyethyl) ribonucleotide
  modified_base 10: mod_base = OTHER; note = 5-methyl cytidine
tgggatgttctttgaattag

SEQ ID NO: 964 - RNA, 20 nt, synthetic construct
  source 1..20: mol_type = other RNA
  modified_base 1..20: mod_base = OTHER; note = Phosphorothioate linkage
  modified_base 1..20: mod_base = OTHER; note = 2'-O-(2-methoxyethyl) ribonucleotide
  modified_base 2: mod_base = OTHER; note = 5-methyl cytidine
  modified_base 12: mod_base = OTHER; note = 5-methyl cytidine
tctgggatgttctttgaatt

SEQ ID NO: 965 - RNA, 20 nt, synthetic construct
  source 1..20: mol_type = other RNA
  modified_base 1..20: mod_base = OTHER; note = Phosphorothioate linkage
  modified_base 1..20: mod_base = OTHER; note = 2'-O-(2-methoxyethyl) ribonucleotide
  modified_base 1..2: mod_base = OTHER; note = 5-methyl cytidine
  modified_base 4: mod_base = OTHER; note = 5-methyl cytidine
  modified_base 14: mod_base = OTHER; note = 5-methyl cytidine
cctctgggatgttctttgaa

SEQ ID NO: 966 - RNA, 20 nt, synthetic construct
  source 1..20: mol_type = other RNA
  modified_base 1..20: mod_base = OTHER; note = Phosphorothioate linkage
  modified_base 1..20: mod_base = OTHER; note = 2'-O-(2-methoxyethyl) ribonucleotide
  modified_base 3..4: mod_base = OTHER; note = 5-methyl cytidine
  modified_base 6: mod_base = OTHER; note = 5-methyl cytidine
  modified_base 16: mod_base = OTHER; note = 5-methyl cytidine
ggcctctgggatgttctttg

SEQ ID NO: 967 - RNA, 20 nt, synthetic construct
  source 1..20: mol_type = other RNA
  modified_base 1..20: mod_base = OTHER; note = Phosphorothioate linkage
  modified_base 1..20: mod_base = OTHER; note = 2'-O-(2-methoxyethyl) ribonucleotide
  modified_base 5..6: mod_base = OTHER; note = 5-methyl cytidine
  modified_base 8: mod_base = OTHER; note = 5-methyl cytidine
  modified_base 18: mod_base = OTHER; note = 5-methyl cytidine
atggcctctgggatgttctt

SEQ ID NO: 968 - RNA, 20 nt, synthetic construct
  source 1..20: mol_type = other RNA
  modified_base 1..20: mod_base = OTHER; note = Phosphorothioate linkage
  modified_base 1..20: mod_base = OTHER; note = 2'-O-(2-methoxyethyl) ribonucleotide
  modified_base 9..10: mod_base = OTHER; note = 5-methyl cytidine
  modified_base 12: mod_base = OTHER; note = 5-methyl cytidine
ggagatggcctctgggatgt

SEQ ID NO: 969 - RNA, 20 nt, synthetic construct
  source 1..20: mol_type = other RNA
  modified_base 1..20: mod_base = OTHER; note = Phosphorothioate linkage
  modified_base 1..20: mod_base = OTHER; note = 2'-O-(2-methoxyethyl) ribonucleotide
  modified_base 12..13: mod_base = OTHER; note = 5-methyl cytidine
  modified_base 15: mod_base = OTHER; note = 5-methyl cytidine
ttaggagatggcctctggga

SEQ ID NO: 970 - DNA, 20 bp, synthetic construct
  source 1..20: mol_type = other DNA
  modified_base 1..20: mod_base = OTHER; note = Phosphorothioate linkage
  modified_base 1..5: mod_base = OTHER; note = 2'-O-(2-methoxyethyl) ribonucleotide
  misc_feature 6..15: note = DNA
  modified_base 16..20: mod_base = OTHER; note = 2'-O-(2-methoxyethyl) ribonucleotide
  modified_base 7..8: mod_base = OTHER; note = 5-methyl cytidine
  modified_base 10: mod_base = OTHER; note = 5-methyl cytidine
  modified_base 20: mod_base = OTHER; note = 5-methyl cytidine
agatggcctctgggatgttc

SEQ ID NO: 971 - DNA, 20 bp, synthetic construct
  source 1..20: mol_type = other DNA
  modified_base 1..20: mod_base = OTHER; note = Phosphorothioate linkage
  modified_base 1..5: mod_base = OTHER; note = 2'-O-(2-methoxyethyl) ribonucleotide
  misc_feature 6..8: note = DNA
  modified_base 9: mod_base = OTHER; note = 2'-O-(2-methoxyethyl) ribonucleotide
  misc_feature 10..11: note = DNA
  modified_base 12: mod_base = OTHER; note = 2'-O-(2-methoxyethyl) ribonucleotide
  misc_feature 13..15: note = DNA
  modified_base 16..20: mod_base = OTHER; note = 2'-O-(2-methoxyethyl) ribonucleotide
  modified_base 7..8: mod_base = OTHER; note = 5-methyl cytidine
  modified_base 10: mod_base = OTHER; note = 5-methyl cytidine
  modified_base 20: mod_base = OTHER; note = 5-methyl cytidine
agatggcctctgggatgttc

SEQ ID NO: 972 - DNA, 20 bp, synthetic construct
  source 1..20: mol_type = other DNA
  modified_base 1..20: mod_base = OTHER; note = Phosphorothioate linkage
  modified_base 1..5: mod_base = OTHER; note = 2'-O-(2-methoxyethyl) ribonucleotide
  modified_base 6: mod_base = OTHER; note = locked nucleic acid
  misc_feature 7..8: note = DNA
  modified_base 9: mod_base = OTHER; note = locked nucleic acid
  misc_feature 10..11: note = DNA
  modified_base 12: mod_base = OTHER; note = locked nucleic acid
  misc_feature 13..14: note = DNA
  modified_base 15: mod_base = OTHER; note = locked nucleic acid
  modified_base 16..20: mod_base = OTHER; note = 2'-O-(2-methoxyethyl) ribonucleotide
  modified_base 7..8: mod_base = OTHER; note = 5-methyl cytidine
  modified_base 10: mod_base = OTHER; note = 5-methyl cytidine
  modified_base 20: mod_base = OTHER; note = 5-methyl cytidine
agatggcctctgggatgttc

SEQ ID NO: 973 - DNA, 20 bp, synthetic construct
  source 1..20: mol_type = other DNA
  modified_base 1..20: mod_base = OTHER; note = Phosphorothioate linkage
  modified_base 1..3: mod_base = OTHER; note = 2'-O-(2-methoxyethyl) ribonucleotide
  modified_base 4: mod_base = OTHER; note = locked nucleic acid
  modified_base 5: mod_base = OTHER; note = 2'-O-(2-methoxyethyl) ribonucleotide
  misc_feature 6..7: note = DNA
  modified_base 8: mod_base = OTHER; note = locked nucleic acid
  misc_feature 9..11: note = DNA
  modified_base 12: mod_base = OTHER; note = locked nucleic acid
  misc_feature 13..15: note = DNA
  modified_base 16: mod_base = OTHER; note = locked nucleic acid
  modified_base 17..20: mod_base = OTHER; note = 2'-O-(2-methoxyethyl) ribonucleotide
  modified_base 7..8: mod_base = OTHER; note = 5-methyl cytidine
  modified_base 10: mod_base = OTHER; note = 5-methyl cytidine
  modified_base 20: mod_base = OTHER; note = 5-methyl cytidine
agatggcctctgggatgttc

SEQ ID NO: 974 - DNA, 20 bp, synthetic construct
  source 1..20: mol_type = other DNA
  modified_base 1..20: mod_base = OTHER; note = Phosphorothioate linkage
  modified_base 1..4: mod_base = OTHER; note = 2'-O-(2-methoxyethyl) ribonucleotide
  modified_base 5: mod_base = OTHER; note = locked nucleic acid
  misc_feature 6..8: note = DNA
  modified_base 9: mod_base = OTHER; note = locked nucleic acid
  misc_feature 10..12: note = DNA
  modified_base 13: mod_base = OTHER; note = locked nucleic acid
  misc_feature 14..15: note = DNA
  modified_base 16: mod_base = OTHER; note = 2'-O-(2-methoxyethyl) ribonucleotide
  modified_base 17: mod_base = OTHER; note = locked nucleic acid
  modified_base 18..20: mod_base = OTHER; note = 2'-O-(2-methoxyethyl) ribonucleotide
  modified_base 7..8: mod_base = OTHER; note = 5-methyl cytidine
  modified_base 10: mod_base = OTHER; note = 5-methyl cytidine
  modified_base 20: mod_base = OTHER; note = 5-methyl cytidine
agatggcctctgggatgttc

SEQ ID NO: 975 - RNA, 20 nt, synthetic construct
  source 1..20: mol_type = other RNA
  modified_base 1..20: mod_base = OTHER; note = Phosphorothioate linkage
  modified_base 1..5: mod_base = OTHER; note = 2'-O-(2-methoxyethyl) ribonucleotide
  modified_base 6: mod_base = OTHER; note = locked nucleic acid
  modified_base 7..8: mod_base = OTHER; note = 2'-O-(2-methoxyethyl) ribonucleotide
  modified_base 9: mod_base = OTHER; note = locked nucleic acid
  modified_base 10..11: mod_base = OTHER; note = 2'-O-(2-methoxyethyl) ribonucleotide
  modified_base 12: mod_base = OTHER; note = locked nucleic acid
  modified_base 13..14: mod_base = OTHER; note = 2'-O-(2-methoxyethyl) ribonucleotide
  modified_base 15: mod_base = OTHER; note = locked nucleic acid
  modified_base 16..20: mod_base = OTHER; note = 2'-O-(2-methoxyethyl) ribonucleotide
  modified_base 7..8: mod_base = OTHER; note = 5-methyl cytidine
  modified_base 10: mod_base = OTHER; note = 5-methyl cytidine
  modified_base 20: mod_base = OTHER; note = 5-methyl cytidine
agatggcctctgggatgttc

SEQ ID NO: 976 - RNA, 20 nt, synthetic construct
  source 1..20: mol_type = other RNA
  modified_base 1..20: mod_base = OTHER; note = Phosphorothioate linkage
  modified_base 1..3: mod_base = OTHER; note = 2'-O-(2-methoxyethyl) ribonucleotide
  modified_base 4: mod_base = OTHER; note = locked nucleic acid
  modified_base 5: mod_base = OTHER; note = 2'-O-(2-methoxyethyl) ribonucleotide
  modified_base 6: mod_base = OTHER; note = locked nucleic acid
  modified_base 7: mod_base = OTHER; note = 2'-O-(2-methoxyethyl) ribonucleotide
  modified_base 8: mod_base = OTHER; note = locked nucleic acid
  modified_base 9: mod_base = OTHER; note = 2'-O-(2-methoxyethyl) ribonucleotide
  modified_base 10: mod_base = OTHER; note = locked nucleic acid
  modified_base 11: mod_base = OTHER; note = 2'-O-(2-methoxyethyl) ribonucleotide
  modified_base 12: mod_base = OTHER; note = locked nucleic acid
  modified_base 13: mod_base = OTHER; note = 2'-O-(2-methoxyethyl) ribonucleotide
  modified_base 14: mod_base = OTHER; note = locked nucleic acid
  modified_base 15: mod_base = OTHER; note = 2'-O-(2-methoxyethyl) ribonucleotide
  modified_base 16: mod_base = OTHER; note = locked nucleic acid
  modified_base 17: mod_base = OTHER; note = 2'-O-(2-methoxyethyl) ribonucleotide
  modified_base 18: mod_base = OTHER; note = locked nucleic acid
  modified_base 19..20: mod_base = OTHER; note = 2'-O-(2-methoxyethyl) ribonucleotide
  modified_base 7..8: mod_base = OTHER; note = 5-methyl cytidine
  modified_base 10: mod_base = OTHER; note = 5-methyl cytidine
  modified_base 20: mod_base = OTHER; note = 5-methyl cytidine
agatggcctctgggatgttc

SEQ ID NO: 977 - RNA, 20 nt, synthetic construct
  source 1..20: mol_type = other RNA
  modified_base 1..20: mod_base = OTHER; note = Phosphorothioate linkage
  modified_base 1..2: mod_base = OTHER; note = 2'-O-(2-methoxyethyl) ribonucleotide
  modified_base 3: mod_base = OTHER; note = locked nucleic acid
  modified_base 4: mod_base = OTHER; note = 2'-O-(2-methoxyethyl) ribonucleotide
  modified_base 5: mod_base = OTHER; note = locked nucleic acid
  modified_base 6: mod_base = OTHER; note = 2'-O-(2-methoxyethyl) ribonucleotide
  modified_base 7: mod_base = OTHER; note = locked nucleic acid
  modified_base 8: mod_base = OTHER; note = 2'-O-(2-methoxyethyl) ribonucleotide
  modified_base 9: mod_base = OTHER; note = locked nucleic acid
  modified_base 10: mod_base = OTHER; note = 2'-O-(2-methoxyethyl) ribonucleotide
  modified_base 11: mod_base = OTHER; note = locked nucleic acid
  modified_base 12: mod_base = OTHER; note = 2'-O-(2-methoxyethyl) ribonucleotide
  modified_base 13: mod_base = OTHER; note = locked nucleic acid
  modified_base 14: mod_base = OTHER; note = 2'-O-(2-methoxyethyl) ribonucleotide
  modified_base 15: mod_base = OTHER; note = locked nucleic acid
  modified_base 16: mod_base = OTHER; note = 2'-O-(2-methoxyethyl) ribonucleotide
  modified_base 17: mod_base = OTHER; note = locked nucleic acid
  modified_base 18..20: mod_base = OTHER; note = 2'-O-(2-methoxyethyl) ribonucleotide
  modified_base 7..8: mod_base = OTHER; note = 5-methyl cytidine
  modified_base 10: mod_base = OTHER; note = 5-methyl cytidine
  modified_base 20: mod_base = OTHER; note = 5-methyl cytidine
agatggcctctgggatgttc

SEQ ID NO: 978 - RNA, 20 nt, synthetic construct
  source 1..20: mol_type = other RNA
  modified_base 1..20: mod_base = OTHER; note = Phosphorothioate linkage
  modified_base 1..2: mod_base = OTHER; note = 2'-O-(2-methoxyethyl) ribonucleotide
  modified_base 3: mod_base = OTHER; note = locked nucleic acid
  modified_base 4..5: mod_base = OTHER; note = 2'-O-(2-methoxyethyl) ribonucleotide
  modified_base 6: mod_base = OTHER; note = locked nucleic acid
  modified_base 7..8: mod_base = OTHER; note = 2'-O-(2-methoxyethyl) ribonucleotide
  modified_base 9: mod_base = OTHER; note = locked nucleic acid
  modified_base 10..11: mod_base = OTHER; note = 2'-O-(2-methoxyethyl) ribonucleotide
  modified_base 12: mod_base = OTHER; note = locked nucleic acid
  modified_base 13..14: mod_base = OTHER; note = 2'-O-(2-methoxyethyl) ribonucleotide
  modified_base 15: mod_base = OTHER; note = locked nucleic acid
  modified_base 16..17: mod_base = OTHER; note = 2'-O-(2-methoxyethyl) ribonucleotide
  modified_base 18: mod_base = OTHER; note = locked nucleic acid
  modified_base 19..20: mod_base = OTHER; note = 2'-O-(2-methoxyethyl) ribonucleotide
  modified_base 7..8: mod_base = OTHER; note = 5-methyl cytidine
  modified_base 10: mod_base = OTHER; note = 5-methyl cytidine
  modified_base 20: mod_base = OTHER; note = 5-methyl cytidine
agatggcctctgggatgttc

SEQ ID NO: 979 - RNA, 20 nt, synthetic construct
  source 1..20: mol_type = other RNA
  modified_base 1..20: mod_base = OTHER; note = Phosphorothioate linkage
  modified_base 1..4: mod_base = OTHER; note = 2'-O-(2-methoxyethyl) ribonucleotide
  modified_base 5: mod_base = OTHER; note = locked nucleic acid
  modified_base 6..8: mod_base = OTHER; note = 2'-O-(2-methoxyethyl) ribonucleotide
  modified_base 9: mod_base = OTHER; note = locked nucleic acid
  modified_base 10..12: mod_base = OTHER; note = 2'-O-(2-methoxyethyl) ribonucleotide
  modified_base 13: mod_base = OTHER; note = locked nucleic acid
  modified_base 14..16: mod_base = OTHER; note = 2'-O-(2-methoxyethyl) ribonucleotide
  modified_base 17: mod_base = OTHER; note = locked nucleic acid
  modified_base 18..20: mod_base = OTHER; note = 2'-O-(2-methoxyethyl) ribonucleotide
  modified_base 7..8: mod_base = OTHER; note = 5-methyl cytidine
  modified_base 10: mod_base = OTHER; note = 5-methyl cytidine
  modified_base 20: mod_base = OTHER; note = 5-methyl cytidine
agatggcctctgggatgttc

SEQ ID NO: 980 - RNA, 20 nt, synthetic construct
  source 1..20: mol_type = other RNA
  modified_base 1..20: mod_base = OTHER; note = Phosphorothioate linkage
  modified_base 1..3: mod_base = OTHER; note = 2'-O-(2-methoxyethyl) ribonucleotide
  modified_base 4: mod_base = OTHER; note = locked nucleic acid
  modified_base 5..7: mod_base = OTHER; note = 2'-O-(2-methoxyethyl) ribonucleotide
  modified_base 8: mod_base = OTHER; note = locked nucleic acid
  modified_base 9..11: mod_base = OTHER; note = 2'-O-(2-methoxyethyl) ribonucleotide
  modified_base 8: mod_base = OTHER; note = locked nucleic acid
  modified_base 13..15: mod_base = OTHER; note = 2'-O-(2-methoxyethyl) ribonucleotide
  modified_base 16: mod_base = OTHER; note = locked nucleic acid
  modified_base 17..20: mod_base = OTHER; note = 2'-O-(2-methoxyethyl) ribonucleotide
  modified_base 7..8: mod_base = OTHER; note = 5-methyl cytidine
  modified_base 10: mod_base = OTHER; note = 5-methyl cytidine
  modified_base 20: mod_base = OTHER; note = 5-methyl cytidine
agatggcctctgggatgttc

SEQ ID NO: 981 - RNA, 20 nt, synthetic construct
  source 1..20: mol_type = other RNA
  modified_base 1..20: mod_base = OTHER; note = Phosphorothioate linkage
  modified_base 1..5: mod_base = OTHER; note = 2'-O-(2-methoxyethyl) ribonucleotide
  modified_base 6: mod_base = OTHER; note = locked nucleic acid
  modified_base 7..10: mod_base = OTHER; note = 2'-O-(2-methoxyethyl) ribonucleotide
  modified_base 11: mod_base = OTHER; note = locked nucleic acid
  modified_base 12..15: mod_base = OTHER; note = 2'-O-(2-methoxyethyl) ribonucleotide
  modified_base 16: mod_base = OTHER; note = locked nucleic acid
  modified_base 17..20: mod_base = OTHER; note = 2'-O-(2-methoxyethyl) ribonucleotide
  modified_base 7..8: mod_base = OTHER; note = 5-methyl cytidine
  modified_base 10: mod_base = OTHER; note = 5-methyl cytidine
  modified_base 20: mod_base = OTHER; note = 5-methyl cytidine
agatggcctctgggatgttc

SEQ ID NO: 982 - RNA, 20 nt, synthetic construct
  source 1..20: mol_type = other RNA
  modified_base 1..20: mod_base = OTHER; note = Phosphorothioate linkage
  modified_base 1..4: mod_base = OTHER; note = 2'-O-(2-methoxyethyl) ribonucleotide
  modified_base 5: mod_base = OTHER; note = locked nucleic acid
  modified_base 6..9: mod_base = OTHER; note = 2'-O-(2-methoxyethyl) ribonucleotide
  modified_base 10: mod_base = OTHER; note = locked nucleic acid
  modified_base 11..14: mod_base = OTHER; note = 2'-O-(2-methoxyethyl) ribonucleotide
  modified_base 15: mod_base = OTHER; note = locked nucleic acid
  modified_base 16..20: mod_base = OTHER; note = 2'-O-(2-methoxyethyl) ribonucleotide
  modified_base 7..8: mod_base = OTHER; note = 5-methyl cytidine
  modified_base 10: mod_base = OTHER; note = 5-methyl cytidine
  modified_base 20: mod_base = OTHER; note = 5-methyl cytidine
agatggcctctgggatgttc

SEQ ID NO: 983 - DNA, 22 bp, synthetic construct
  source 1..22: mol_type = other DNA
  modified_base 1..22: mod_base = OTHER; note = Phosphorothioate linkage
  modified_base 1..6: mod_base = OTHER; note = 2'-O-(2-methoxyethyl) ribonucleotide
  misc_feature 7..16: note = DNA
  modified_base 17..22: mod_base = OTHER; note = 2'-O-(2-methoxyethyl) ribonucleotide
  modified_base 8..9: mod_base = OTHER; note = 5-methyl cytidine
  modified_base 11: mod_base = OTHER; note = 5-methyl cytidine
  modified_base 19: mod_base = OTHER; note = 5-methyl cytidine
gagatggcctctgggatgttct

SEQ ID NO: 984 - RNA, 22 nt, synthetic construct
  source 1..22: mol_type = other RNA
  modified_base 1..22: mod_base = OTHER; note = Phosphorothioate linkage
  modified_base 1..22: mod_base = OTHER; note = 2'-O-(2-methoxyethyl) ribonucleotide
  modified_base 8..9: mod_base = OTHER; note = 5-methyl cytidine
  modified_base 11: mod_base = OTHER; note = 5-methyl cytidine
  modified_base 21: mod_base = OTHER; note = 5-methyl cytidine
gagatggcctctgggatgttct

SEQ ID NO: 985 - DNA, 22 bp, synthetic construct
  source 1..22: mol_type = other DNA
  modified_base 1..22: mod_base = OTHER; note = Phosphorothioate linkage
  modified_base 1..5: mod_base = OTHER; note = 2'-O-(2-methoxyethyl) ribonucleotide
  misc_feature 6..8: note = DNA
  modified_base 9: mod_base = OTHER; note = 2'-O-(2-methoxyethyl) ribonucleotide
  misc_feature 10..13: note = DNA
  modified_base 14: mod_base = OTHER; note = 2'-O-(2-methoxyethyl) ribonucleotide
  misc_feature 15..17: note = DNA
  modified_base 18..22: mod_base = OTHER; note = 2'-O-(2-methoxyethyl) ribonucleotide
  modified_base 8..9: mod_base = OTHER; note = 5-methyl cytidine
  modified_base 11: mod_base = OTHER; note = 5-methyl cytidine
  modified_base 21: mod_base = OTHER; note = 5-methyl cytidine
gagatggcctctgggatgttct

SEQ ID NO: 986 - DNA, 22 bp, synthetic construct
  source 1..22: mol_type = other DNA
  modified_base 1..22: mod_base = OTHER; note = Phosphorothioate linkage
  modified_base 1..5: mod_base = OTHER; note = 2'-O-(2-methoxyethyl) ribonucleotide
  modified_base 6: mod_base = OTHER; note = locked nucleic acid
  misc_feature 7..8: note = DNA
  modified_base 9: mod_base = OTHER; note = locked nucleic acid
  misc_feature 10..13: note = DNA
  modified_base 14: mod_base = OTHER; note = locked nucleic acid
  misc_feature 15..16: note = DNA
  modified_base 17: mod_base = OTHER; note = locked nucleic acid
  modified_base 18..22: mod_base = OTHER; note = 2'-O-(2-methoxyethyl) ribonucleotide
  modified_base 8..9: mod_base = OTHER; note = 5-methyl cytidine
  modified_base 11: mod_base = OTHER; note = 5-methyl cytidine
  modified_base 21: mod_base = OTHER; note = 5-methyl cytidine
gagatggcctctgggatgttct

SEQ ID NO: 987 - DNA, 24 bp, synthetic construct
  source 1..24: mol_type = other DNA
  modified_base 1..24: mod_base = OTHER; note = Phosphorothioate linkage
  modified_base 1..7: mod_base = OTHER; note = 2'-O-(2-methoxyethyl) ribonucleotide
  modified_base 8..17: mod_base = OTHER; note = locked nucleic acid
  modified_base 18..24: mod_base = OTHER; note = 2'-O-(2-methoxyethyl) ribonucleotide
  modified_base 9..10: mod_base = OTHER; note = 5-methyl cytidine
  modified_base 12: mod_base = OTHER; note = 5-methyl cytidine
  modified_base 22: mod_base = OTHER; note = 5-methyl cytidine
ggagatggcctctgggatgttctt

SEQ ID NO: 988 - RNA, 24 nt, synthetic construct
  source 1..24: mol_type = other RNA
  modified_base 1..24: mod_base = OTHER; note = Phosphorothioate linkage
  modified_base 1..24: mod_base = OTHER; note = 2'-O-(2-methoxyethyl) ribonucleotide
  modified_base 9..10: mod_base = OTHER; note = 5-methyl cytidine
  modified_base 12: mod_base = OTHER; note = 5-methyl cytidine
  modified_base 22: mod_base = OTHER; note = 5-methyl cytidine
ggagatggcctctgggatgttctt

SEQ ID NO: 989 - DNA, 24 bp, synthetic construct
  source 1..24: mol_type = other DNA
  modified_base 1..24: mod_base = OTHER; note = Phosphorothioate linkage
  modified_base 1..5: mod_base = OTHER; note = 2'-O-(2-methoxyethyl) ribonucleotide
  misc_feature 6..7: note = DNA
  modified_base 8: mod_base = OTHER; note = 2'-O-(2-methoxyethyl) ribonucleotide
  misc_feature 9..10: note = DNA
  modified_base 11: mod_base = OTHER; note = 2'-O-(2-methoxyethyl) ribonucleotide
  misc_feature 12..13: note = DNA
  modified_base 14: mod_base = OTHER; note = 2'-O-(2-methoxyethyl) ribonucleotide
  misc_feature 15..16: note = DNA
  modified_base 17: mod_base = OTHER; note = 2'-O-(2-methoxyethyl) ribonucleotide
  misc_feature 18..19: note = DNA
  modified_base 20..24: mod_base = OTHER; note = 2'-O-(2-methoxyethyl) ribonucleotide
  modified_base 9..10: mod_base = OTHER; note = 5-methyl cytidine
  modified_base 12: mod_base = OTHER; note = 5-methyl cytidine
  modified_base 22: mod_base = OTHER; note = 5-methyl cytidine
ggagatggcctctgggatgttctt

SEQ ID NO: 990 - DNA, 24 bp, synthetic construct
  source 1..24: mol_type = other DNA
  modified_base 1..24: mod_base = OTHER; note = Phosphorothioate linkage
  modified_base 1..5: mod_base = OTHER; note = 2'-O-(2-methoxyethyl) ribonucleotide
  misc_feature 6..7: note = DNA
  modified_base 8: mod_base = OTHER; note = locked nucleic acid
  misc_feature 9..10: note = DNA
  modified_base 11: mod_base = OTHER; note = locked nucleic acid
  misc_feature 12..13: note = DNA
  modified_base 14: mod_base = OTHER; note = locked nucleic acid
  misc_feature 15..16: note = DNA
  modified_base 17: mod_base = OTHER; note = locked nucleic acid
  misc_feature 18..19: note = DNA
  modified_base 20..24: mod_base = OTHER; note = 2'-O-(2-methoxyethyl) ribonucleotide
  modified_base 9..10: mod_base = OTHER; note = 5-methyl cytidine
  modified_base 12: mod_base = OTHER; note = 5-methyl cytidine
  modified_base 22: mod_base = OTHER; note = 5-methyl cytidine
ggagatggcctctgggatgttctt

SEQ ID NO: 991 - DNA, 21 bp, synthetic construct
  source 1..21: mol_type = other DNA
  modified_base 1..21: mod_base = OTHER; note = Phosphorothioate linkage
  modified_base 1..5: mod_base = OTHER; note = 2'-O-(2-methoxyethyl) ribonucleotide
  misc_feature 6..16: note = DNA
  modified_base 17..21: mod_base = OTHER; note = 2'-O-(2-methoxyethyl) ribonucleotide
  modified_base 4: mod_base = OTHER; note = 5-methyl cytidine
  modified_base 18: mod_base = OTHER; note = 5-methyl cytidine
ggacttgggagtggtgactga

SEQ ID NO: 992 - DNA, 21 bp, synthetic construct
  source 1..21: mol_type = other DNA
  modified_base 1..21: mod_base = OTHER; note = Phosphorothioate linkage
  modified_base 1..5: mod_base = OTHER; note = 2'-O-(2-methoxyethyl) ribonucleotide
  misc_feature 6..8: note = DNA
  modified_base 9: mod_base = OTHER; note = 2'-O-(2-methoxyethyl) ribonucleotide
  misc_feature 10..12: note = DNA
  modified_base 13: mod_base = OTHER; note = 2'-O-(2-methoxyethyl) ribonucleotide
  misc_feature 14..16: note = DNA
  modified_base 17..21: mod_base = OTHER; note = 2'-O-(2-methoxyethyl) ribonucleotide
  modified_base 4: mod_base = OTHER; note = 5-methyl cytidine
ggacttgggagtggtgactga

SEQ ID NO: 993 - DNA, 21 bp, synthetic construct
  source 1..21: mol_type = other DNA
  modified_base 1..21: mod_base = OTHER; note = Phosphorothioate linkage
  modified_base 1..3: mod_base = OTHER; note = 2'-O-(2-methoxyethyl) ribonucleotide
  modified_base 4: mod_base = OTHER; note = locked nucleic acid
  modified_base 5: mod_base = OTHER; note = 2'-O-(2-methoxyethyl) ribonucleotide
  modified_base 6: mod_base = OTHER; note = locked nucleic acid
  modified_base 7: mod_base = OTHER; note = 2'-O-(2-methoxyethyl) ribonucleotide
  modified_base 8: mod_base = OTHER; note = locked nucleic acid
  modified_base 9: mod_base = OTHER; note = 2'-O-(2-methoxyethyl) ribonucleotide
  modified_base 10: mod_base = OTHER; note = locked nucleic acid
  modified_base 11: mod_base = OTHER; note = 2'-O-(2-methoxyethyl) ribonucleotide
  modified_base 12: mod_base = OTHER; note = locked nucleic acid
  modified_base 13: mod_base = OTHER; note = 2'-O-(2-methoxyethyl) ribonucleotide
  modified_base 14: mod_base = OTHER; note = locked nucleic acid
  modified_base 15: mod_base = OTHER; note = 2'-O-(2-methoxyethyl) ribonucleotide
  modified_base 16: mod_base = OTHER; note = locked nucleic acid
  modified_base 17: mod_base = OTHER; note = 2'-O-(2-methoxyethyl) ribonucleotide
  modified_base 18: mod_base = OTHER; note = locked nucleic acid
  modified_base 19..21: mod_base = OTHER; note = 2'-O-(2-methoxyethyl) ribonucleotide
  modified_base 4: mod_base = OTHER; note = 5-methyl cytidine
  modified_base 18: mod_base = OTHER; note = 5-methyl cytidine
ggacttgggagtggtgactga

SEQ ID NO: 994 - RNA, 21 nt, synthetic construct
  source 1..21: mol_type = other RNA
  modified_base 1..21: mod_base = OTHER; note = Phosphorothioate linkage
  modified_base 1..3: mod_base = OTHER; note = 2'-O-(2-methoxyethyl) ribonucleotide
  modified_base 4: mod_base = OTHER; note = locked nucleic acid
  modified_base 5..6: mod_base = OTHER; note = 2'-O-(2-methoxyethyl) ribonucleotide
  modified_base 7: mod_base = OTHER; note = locked nucleic acid
  modified_base 8..9: mod_base = OTHER; note = 2'-O-(2-methoxyethyl) ribonucleotide
  modified_base 10: mod_base = OTHER; note = locked nucleic acid
  modified_base 11..12: mod_base = OTHER; note = 2'-O-(2-methoxyethyl) ribonucleotide
  modified_base 13: mod_base = OTHER; note = locked nucleic acid
  modified_base 14..15: mod_base = OTHER; note = 2'-O-(2-methoxyethyl) ribonucleotide
  modified_base 16: mod_base = OTHER; note = locked nucleic acid
  modified_base 17..18: mod_base = OTHER; note = 2'-O-(2-methoxyethyl) ribonucleotide
  modified_base 19: mod_base = OTHER; note = locked nucleic acid
  modified_base 20..21: mod_base = OTHER; note = 2'-O-(2-methoxyethyl) ribonucleotide
  modified_base 4: mod_base = OTHER; note = 5-methyl cytidine
  modified_base 18: mod_base = OTHER; note = 5-methyl cytidine
ggacttgggagtggtgactga

SEQ ID NO: 995 - RNA, 21 nt, synthetic construct
  source 1..21: mol_type = other RNA
  modified_base 1..21: mod_base = OTHER; note = Phosphorothioate linkage
  modified_base 1..2: mod_base = OTHER; note = 2'-O-(2-methoxyethyl) ribonucleotide
  modified_base 3: mod_base = OTHER; note = locked nucleic acid
  modified_base 4..5: mod_base = OTHER; note = 2'-O-(2-methoxyethyl) ribonucleotide
  modified_base 6: mod_base = OTHER; note = locked nucleic acid
  modified_base 7..8: mod_base = OTHER; note = 2'-O-(2-methoxyethyl) ribonucleotide
  modified_base 9: mod_base = OTHER; note = locked nucleic acid
  modified_base 10..11: mod_base = OTHER; note = 2'-O-(2-methoxyethyl) ribonucleotide
  modified_base 12: mod_base = OTHER; note = locked nucleic acid
  modified_base 13..14: mod_base = OTHER; note = 2'-O-(2-methoxyethyl) ribonucleotide
  modified_base 15: mod_base = OTHER; note = locked nucleic acid
  modified_base 16..17: mod_base = OTHER; note = 2'-O-(2-methoxyethyl) ribonucleotide
  modified_base 18: mod_base = OTHER; note = locked nucleic acid
  modified_base 19..21: mod_base = OTHER; note = 2'-O-(2-methoxyethyl) ribonucleotide
ggacttgggagtggtgactga

SEQ ID NO: 996 - RNA, 21 nt, synthetic construct
  source 1..21: mol_type = other RNA
  modified_base 1..21: mod_base = OTHER; note = Phosphorothioate linkage
  modified_base 1..4: mod_base = OTHER; note = 2'-O-(2-methoxyethyl) ribonucleotide
  modified_base 5: mod_base = OTHER; note = locked nucleic acid
  modified_base 6..8: mod_base = OTHER; note = 2'-O-(2-methoxyethyl) ribonucleotide
  modified_base 9: mod_base = OTHER; note = locked nucleic acid
  modified_base 10..12: mod_base = OTHER; note = 2'-O-(2-methoxyethyl) ribonucleotide
  modified_base 13: mod_base = OTHER; note = locked nucleic acid
  modified_base 14..16: mod_base = OTHER; note = 2'-O-(2-methoxyethyl) ribonucleotide
  modified_base 17: mod_base = OTHER; note = locked nucleic acid
  modified_base 18..21: mod_base = OTHER; note = 2'-O-(2-methoxyethyl) ribonucleotide
  modified_base 4: mod_base = OTHER; note = 5-methyl cytidine
  modified_base 18: mod_base = OTHER; note = 5-methyl cytidine
ggacttgggagtggtgactga

SEQ ID NO: 997 - RNA, 21 nt, synthetic construct
  source 1..21: mol_type = other RNA
  modified_base 1..21: mod_base = OTHER; note = Phosphorothioate linkage
  modified_base 1..5: mod_base = OTHER; note = 2'-O-(2-methoxyethyl) ribonucleotide
  modified_base 6: mod_base = OTHER; note = locked nucleic acid
  modified_base 7..10: mod_base = OTHER; note = 2'-O-(2-methoxyethyl) ribonucleotide
  modified_base 11: mod_base = OTHER; note = locked nucleic acid
  modified_base 12..15: mod_base = OTHER; note = 2'-O-(2-methoxyethyl) ribonucleotide
  modified_base 16: mod_base = OTHER; note = locked nucleic acid
  modified_base 17..21: mod_base = OTHER; note = 2'-O-(2-methoxyethyl) ribonucleotide
  modified_base 4: mod_base = OTHER; note = 5-methyl cytidine
  modified_base 18: mod_base = OTHER; note = 5-methyl cytidine
ggacttgggagtggtgactga

SEQ ID NO: 998 - DNA, 23 bp, synthetic construct
  source 1..23: mol_type = other DNA
  modified_base 1..23: mod_base = OTHER; note = Phosphorothioate linkage
  modified_base 1..5: mod_base = OTHER; note = 2'-O-(2-methoxyethyl) ribonucleotide
  misc_feature 6..18: note = DNA
  modified_base 18..23: mod_base = OTHER; note = 2'-O-(2-methoxyethyl) ribonucleotide
  modified_base 4: mod_base = OTHER; note = 5-methyl cytidine
  modified_base 18: mod_base = OTHER; note = 5-methyl cytidine
  modified_base 23: mod_base = OTHER; note = 5-methyl cytidine
ggacttgggagtggtgactgaac

SEQ ID NO: 999 - RNA, 23 nt, synthetic construct
  source 1..23: mol_type = other RNA
  modified_base 1..23: mod_base = OTHER; note = Phosphorothioate linkage
  modified_base 1..2: mod_base = OTHER; note = 2'-O-(2-methoxyethyl) ribonucleotide
  modified_base 3: mod_base = OTHER; note = Locked nucleic acid
  modified_base 4..5: mod_base = OTHER; note = 2'-O-(2-methoxyethyl) ribonucleotide
  modified_base 6: mod_base = OTHER; note = Locked nucleic acid
  modified_base 7..8: mod_base = OTHER; note = 2'-O-(2-methoxyethyl) ribonucleotide
  modified_base 9: mod_base = OTHER; note = Locked nucleic acid
  modified_base 10..11: mod_base = OTHER; note = 2'-O-(2-methoxyethyl) ribonucleotide
  modified_base 12: mod_base = OTHER; note = Locked nucleic acid
  modified_base 13..14: mod_base = OTHER; note = 2'-O-(2-methoxyethyl) ribonucleotide
  modified_base 15: mod_base = OTHER; note = Locked nucleic acid
  modified_base 16..17: mod_base = OTHER; note = 2'-O-(2-methoxyethyl) ribonucleotide
  modified_base 18: mod_base = OTHER; note = Locked nucleic acid
  modified_base 19..20: mod_base = OTHER; note = 2'-O-(2-methoxyethyl) ribonucleotide
  modified_base 21: mod_base = OTHER; note = Locked nucleic acid
  modified_base 22..23: mod_base = OTHER; note = 2'-O-(2-methoxyethyl) ribonucleotide
  modified_base 4: mod_base = OTHER; note = 5-methyl cytidine
  modified_base 18: mod_base = OTHER; note = 5-methyl cytidine
  modified_base 23: mod_base = OTHER; note = 5-methyl cytidine
ggacttgggagtggtgactgaac

SEQ ID NO: 1000 - RNA, 23 nt, synthetic construct
  source 1..23: mol_type = other RNA
  modified_base 1..23: mod_base = OTHER; note = Phosphorothioate linkage
  modified_base 1..5: mod_base = OTHER; note = 2'-O-(2-methoxyethyl) ribonucleotide
  modified_base 6: mod_base = OTHER; note = Locked nucleic acid
  modified_base 7..11: mod_base = OTHER; note = 2'-O-(2-methoxyethyl) ribonucleotide
  modified_base 12: mod_base = OTHER; note = Locked nucleic acid
  modified_base 13..17: mod_base = OTHER; note = 2'-O-(2-methoxyethyl) ribonucleotide
  modified_base 18: mod_base = OTHER; note = Locked nucleic acid
  modified_base 19..23: mod_base = OTHER; note = 2'-O-(2-methoxyethyl) ribonucleotide
  modified_base 4: mod_base = OTHER; note = 5-methyl cytidine
  modified_base 18: mod_base = OTHER; note = 5-methyl cytidine
  modified_base 23: mod_base = OTHER; note = 5-methyl cytidine
ggacttgggagtggtgactgaac

SEQ ID NO: 1001 - RNA, 23 nt, synthetic construct
  source 1..23: mol_type = other RNA
  modified_base 1..23: mod_base = OTHER; note = Phosphorothioate linkage
  modified_base 1..3: mod_base = OTHER; note = 2'-O-(2-methoxyethyl) ribonucleotide
  modified_base 4: mod_base = OTHER; note = Locked nucleic acid
  modified_base 5..7: mod_base = OTHER; note = 2'-O-(2-methoxyethyl) ribonucleotide
  modified_base 8: mod_base = OTHER; note = Locked nucleic acid
  modified_base 9..11: mod_base = OTHER; note = 2'-O-(2-methoxyethyl) ribonucleotide
  modified_base 12: mod_base = OTHER; note = Locked nucleic acid
  modified_base 13..15: mod_base = OTHER; note = 2'-O-(2-methoxyethyl) ribonucleotide
  modified_base 16: mod_base = OTHER; note = Locked nucleic acid
  modified_base 17..19: mod_base = OTHER; note = 2'-O-(2-methoxyethyl) ribonucleotide
  modified_base 20: mod_base = OTHER; note = Locked nucleic acid
  modified_base 21..23: mod_base = OTHER; note = 2'-O-(2-methoxyethyl) ribonucleotide
  modified_base 4: mod_base = OTHER; note = 5-methyl cytidine
  modified_base 18: mod_base = OTHER; note = 5-methyl cytidine
  modified_base 23: mod_base = OTHER; note = 5-methyl cytidine
ggacttgggagtggtgactgaac

SEQ ID NO: 1002 - RNA, 23 nt, synthetic construct
  source 1..23: mol_type = other RNA
  modified_base 1..23: mod_base = OTHER; note = Phosphorothioate linkage
  modified_base 1..4: mod_base = OTHER; note = 2'-O-(2-methoxyethyl) ribonucleotide
  modified_base 5: mod_base = OTHER; note = Locked nucleic acid
  modified_base 6..9: mod_base = OTHER; note = 2'-O-(2-methoxyethyl) ribonucleotide
  modified_base 10: mod_base = OTHER; note = Locked nucleic acid
  modified_base 11..14: mod_base = OTHER; note = 2'-O-(2-methoxyethyl) ribonucleotide
  modified_base 15: mod_base = OTHER; note = Locked nucleic acid
  modified_base 16..19: mod_base = OTHER; note = 2'-O-(2-methoxyethyl) ribonucleotide
  modified_base 20: mod_base = OTHER; note = Locked nucleic acid
  modified_base 21..23: mod_base = OTHER; note = 2'-O-(2-methoxyethyl) ribonucleotide
  modified_base 4: mod_base = OTHER; note = 5-methyl cytidine
  modified_base 18: mod_base = OTHER; note = 5-methyl cytidine
  modified_base 23: mod_base = OTHER; note = 5-methyl cytidine
ggacttgggagtggtgactgaac

SEQ ID NO: 1003 - RNA, 23 nt, synthetic construct
  source 1..23: mol_type = other RNA
  modified_base 1..23: mod_base = OTHER; note = Phosphorothioate linkage
  modified_base 1..3: mod_base = OTHER; note = 2'-O-(2-methoxyethyl) ribonucleotide
  modified_base 4: mod_base = OTHER; note = Locked nucleic acid
  modified_base 5..8: mod_base = OTHER; note = 2'-O-(2-methoxyethyl) ribonucleotide
  modified_base 9: mod_base = OTHER; note = Locked nucleic acid
  modified_base 10..13: mod_base = OTHER; note = 2'-O-(2-methoxyethyl) ribonucleotide
  modified_base 14: mod_base = OTHER; note = Locked nucleic acid
  modified_base 15..19: mod_base = OTHER; note = 2'-O-(2-methoxyethyl) ribonucleotide
  modified_base 19: mod_base = OTHER; note = Locked nucleic acid
  modified_base 20..23: mod_base = OTHER; note = 2'-O-(2-methoxyethyl) ribonucleotide
  modified_base 4: mod_base = OTHER; note = 5-methyl cytidine
  modified_base 18: mod_base = OTHER; note = 5-methyl cytidine
  modified_base 23: mod_base = OTHER; note = 5-methyl cytidine
ggacttgggagtggtgactgaac

SEQ ID NO: 1004 - RNA, 24 nt, synthetic construct
  source 1..24: mol_type = other RNA
  modified_base 1..24: mod_base = OTHER; note = Phosphorothioate linkage
  modified_base 1..24: mod_base = OTHER; note = 2'-O-(2-methoxyethyl) ribonucleotide
  modified_base 5: mod_base = OTHER; note = 5-methyl cytidine
  modified_base 19: mod_base = OTHER; note = 5-methyl cytidine
  modified_base 24: mod_base = OTHER; note = 5-methyl cytidine
gggacttgggagtggtgactgaac

SEQ ID NO: 1005 - RNA, 24 nt, synthetic construct
  source 1..24: mol_type = other RNA
  modified_base 1..24: mod_base = OTHER; note = Phosphorothioate linkage
  modified_base 1..24: mod_base = OTHER; note = 2'-O-(2-methoxyethyl) ribonucleotide
  modified_base 4: mod_base = OTHER; note = 5-methyl cytidine
  modified_base 18: mod_base = OTHER; note = 5-methyl cytidine
  modified_base 23..24: mod_base = OTHER; note = 5-methyl cytidine
ggacttgggagtggtgactgaacc

SEQ ID NO: 1006 - RNA, 25 nt, synthetic construct
  source 1..25: mol_type = other RNA
  modified_base 1..25: mod_base = OTHER; note = Phosphorothioate linkage
  modified_base 1..25: mod_base = OTHER; note = 2'-O-(2-methoxyethyl) ribonucleotide
  modified_base 5: mod_base = OTHER; note = 5-methyl cytidine
  modified_base 19: mod_base = OTHER; note = 5-methyl cytidine
  modified_base 24..25: mod_base = OTHER; note = 5-methyl cytidine
gggacttgggagtggtgactgaacc

SEQ ID NO: 1007 - RNA, 26 nt, synthetic construct
  source 1..26: mol_type = other RNA
  modified_base 1..26: mod_base = OTHER; note = Phosphorothioate linkage
  modified_base 1..26: mod_base = OTHER; note = 2'-O-(2-methoxyethyl) ribonucleotide
  modified_base 5: mod_base = OTHER; note = 5-methyl cytidine
  modified_base 19: mod_base = OTHER; note = 5-methyl cytidine
  modified_base 24..25: mod_base = OTHER; note = 5-methyl cytidine
gggacttgggagtggtgactgaacct

SEQ ID NO: 1008 - RNA, 26 nt, synthetic construct
  source 1..26: mol_type = other RNA
  modified_base 1..26: mod_base = OTHER; note = Phosphorothioate linkage
  modified_base 1..26: mod_base = OTHER; note = 2'-O-(2-methoxyethyl) ribonucleotide
  modified_base 6: mod_base = OTHER; note = 5-methyl cytidine
  modified_base 20: mod_base = OTHER; note = 5-methyl cytidine
  modified_base 25..26: mod_base = OTHER; note = 5-methyl cytidine
agggacttgggagtggtgactgaacc

SEQ ID NO: 1009 - RNA, 20 nt, synthetic construct
  source 1..20: mol_type = other RNA
  modified_base 1..3: mod_base = OTHER; note = Phosphorothioate linkage
  modified_base 7..20: mod_base = OTHER; note = Phosphorothioate linkage
  modified_base 1..20: mod_base = OTHER; note = 2'-O-(2-methoxyethyl) ribonucleotide
  modified_base 10: mod_base = OTHER; note = 5-methyl cytidine
  modified_base 12: mod_base = OTHER; note = 5-methyl cytidine
taggagaatcgctttgggag

SEQ ID NO: 1010 - RNA, 20 nt, synthetic construct
  source 1..20: mol_type = other RNA
  modified_base 1..3: mod_base = OTHER; note = Phosphorothioate linkage
  modified_base 9..20: mod_base = OTHER; note = Phosphorothioate linkage
  modified_base 1..20: mod_base = OTHER; note = 2'-O-(2-methoxyethyl) ribonucleotide
  modified_base 10: mod_base = OTHER; note = 5-methyl cytidine
  modified_base 12: mod_base = OTHER; note = 5-methyl cytidine
taggagaatcgctttgggag

SEQ ID NO: 1011 - RNA, 20 nt, synthetic construct
  source 1..20: mol_type = other RNA
  modified_base 1..3: mod_base = OTHER; note = Phosphorothioate linkage
  modified_base 11..20: mod_base = OTHER; note = Phosphorothioate linkage
  modified_base 1..20: mod_base = OTHER; note = 2'-O-(2-methoxyethyl) ribonucleotide
  modified_base 10: mod_base = OTHER; note = 5-methyl cytidine
  modified_base 12: mod_base = OTHER; note = 5-methyl cytidine
taggagaatcgctttgggag

SEQ ID NO: 1012 - RNA, 20 nt, synthetic construct
  source 1..20: mol_type = other RNA
  modified_base 1..3: mod_base = OTHER; note = Phosphorothioate linkage
  modified_base 13..20: mod_base = OTHER; note = Phosphorothioate linkage
  modified_base 1..20: mod_base = OTHER; note = 2'-O-(2-methoxyethyl) ribonucleotide
  modified_base 10: mod_base = OTHER; note = 5-methyl cytidine
  modified_base 12: mod_base = OTHER; note = 5-methyl cytidine
taggagaatcgctttgggag

SEQ ID NO: 1013 - RNA, 20 nt, synthetic construct
  source 1..20: mol_type = other RNA
  modified_base 1..3: mod_base = OTHER; note = Phosphorothioate linkage
  modified_base 15..20: mod_base = OTHER; note = Phosphorothioate linkage
  modified_base 1..20: mod_base = OTHER; note = 2'-O-(2-methoxyethyl) ribonucleotide
  modified_base 1..2: mod_base = OTHER; note = 5-methyl cytidine
  modified_base 10: mod_base = OTHER; note = 5-methyl cytidine
  modified_base 12: mod_base = OTHER; note = 5-methyl cytidine
taggagaatcgctttgggag

SEQ ID NO: 1014 - RNA, 20 nt, synthetic construct
  source 1..20: mol_type = other RNA
  modified_base 1..3: mod_base = OTHER; note = Phosphorothioate linkage
  modified_base 17..20: mod_base = OTHER; note = Phosphorothioate linkage
  modified_base 1..20: mod_base = OTHER; note = 2'-O-(2-methoxyethyl) ribonucleotide
  modified_base 10: mod_base = OTHER; note = 5-methyl cytidine
  modified_base 12: mod_base = OTHER; note = 5-methyl cytidine
taggagaatcgctttgggag

SEQ ID NO: 1015 - RNA, 20 nt, synthetic construct
  source 1..20: mol_type = other RNA
  modified_base 1..4: mod_base = OTHER; note = Phosphorothioate linkage
  modified_base 18..20: mod_base = OTHER; note = Phosphorothioate linkage
  modified_base 1..20: mod_base = OTHER; note = 2'-O-(2-methoxyethyl) ribonucleotide
  modified_base 10: mod_base = OTHER; note = 5-methyl cytidine
  modified_base 12: mod_base = OTHER; note = 5-methyl cytidine
taggagaatcgctttgggag

SEQ ID NO: 1016 - RNA, 20 nt, synthetic construct
  source 1..20: mol_type = other RNA
  modified_base 1..6: mod_base = OTHER; note = Phosphorothioate linkage
  modified_base 18..20: mod_base = OTHER; note = Phosphorothioate linkage
  modified_base 1..20: mod_base = OTHER; note = 2'-O-(2-methoxyethyl) ribonucleotide
  modified_base 10: mod_base = OTHER; note = 5-methyl cytidine
  modified_base 12: mod_base = OTHER; note = 5-methyl cytidine
taggagaatcgctttgggag

SEQ ID NO: 1017 - RNA, 20 nt, synthetic construct
  source 1..20: mol_type = other RNA
  modified_base 1..8: mod_base = OTHER; note = Phosphorothioate linkage
  modified_base 18..20: mod_base = OTHER; note = Phosphorothioate linkage
  modified_base 1..20: mod_base = OTHER; note = 2'-O-(2-methoxyethyl) ribonucleotide
  modified_base 10: mod_base = OTHER; note = 5-methyl cytidine
  modified_base 12: mod_base = OTHER; note = 5-methyl cytidine
taggagaatcgctttgggag

SEQ ID NO: 1018 - RNA, 20 nt, synthetic construct
  source 1..20: mol_type = other RNA
  modified_base 1..20: mod_base = OTHER; note = Phosphorothioate linkage
  modified_base 1..20: mod_base = OTHER; note = 2'-O-(2-methoxyethyl) ribonucleotide
  modified_base 1: mod_base = OTHER; note = 5-methyl cytidine
  modified_base 3..4: mod_base = OTHER; note = 5-methyl cytidine
  modified_base 6..7: mod_base = OTHER; note = 5-methyl cytidine
  modified_base 11: mod_base = OTHER; note = 5-methyl cytidine
  modified_base 14..15: mod_base = OTHER; note = 5-methyl cytidine
  modified_base 17: mod_base = OTHER; note = 5-methyl cytidine
ctcctccttacttcctcttg

SEQ ID NO: 1019 - RNA, 20 nt, synthetic construct
  source 1..20: mol_type = other RNA
  modified_base 1..20: mod_base = OTHER; note = Phosphorothioate linkage
  modified_base 1..20: mod_base = OTHER; note = 2'-O-(2-methoxyethyl) ribonucleotide
  modified_base 4: mod_base = OTHER; note = 5-methyl cytidine
  modified_base 6..7: mod_base = OTHER; note = 5-methyl cytidine
  modified_base 9..10: mod_base = OTHER; note = 5-methyl cytidine
  modified_base 14: mod_base = OTHER; note = 5-methyl cytidine
  modified_base 17..18: mod_base = OTHER; note = 5-methyl cytidine
  modified_base 20: mod_base = OTHER; note = 5-methyl cytidine
tggctcctccttacttcctc

SEQ ID NO: 1020 - RNA, 20 nt, synthetic construct
  source 1..20: mol_type = other RNA
  modified_base 1..20: mod_base = OTHER; note = Phosphorothioate linkage
  modified_base 1..20: mod_base = OTHER; note = 2'-O-(2-methoxyethyl) ribonucleotide
  modified_base 3: mod_base = OTHER; note = 5-methyl cytidine
  modified_base 7: mod_base = OTHER; note = 5-methyl cytidine
  modified_base 9..10: mod_base = OTHER; note = 5-methyl cytidine
  modified_base 12..13: mod_base = OTHER; note = 5-methyl cytidine
  modified_base 17: mod_base = OTHER; note = 5-methyl cytidine
  modified_base 20: mod_base = OTHER; note = 5-methyl cytidine
gtctggctcctccttacttc

SEQ ID NO: 1021 - RNA, 20 nt, synthetic construct
  source 1..20: mol_type = other RNA
  modified_base 1..20: mod_base = OTHER; note = Phosphorothioate linkage
  modified_base 1..20: mod_base = OTHER; note = 2'-O-(2-methoxyethyl) ribonucleotide
  modified_base 1: mod_base = OTHER; note = 5-methyl cytidine
  modified_base 6: mod_base = OTHER; note = 5-methyl cytidine
  modified_base 10: mod_base = OTHER; note = 5-methyl cytidine
  modified_base 12..13: mod_base = OTHER; note = 5-methyl cytidine
  modified_base 15..16: mod_base = OTHER; note = 5-methyl cytidine
  modified_base 20: mod_base = OTHER; note = 5-methyl cytidine
ctggtctggctcctccttac

SEQ ID NO: 1022 - RNA, 20 nt, synthetic construct
  source 1..20: mol_type = other RNA
  modified_base 1..20: mod_base = OTHER; note = Phosphorothioate linkage
  modified_base 1..20: mod_base = OTHER; note = 2'-O-(2-methoxyethyl) ribonucleotide
  modified_base 3..4: mod_base = OTHER; note = 5-methyl cytidine
  modified_base 9: mod_base = OTHER; note = 5-methyl cytidine
  modified_base 13: mod_base = OTHER; note = 5-methyl cytidine
  modified_base 15..16: mod_base = OTHER; note = 5-methyl cytidine
  modified_base 18..19: mod_base = OTHER; note = 5-methyl cytidine
aacctggtctggctcctcct

SEQ ID NO: 1023 - RNA, 20 nt, synthetic construct
  source 1..20: mol_type = other RNA
  modified_base 1..20: mod_base = OTHER; note = Phosphorothioate linkage
  modified_base 1..20: mod_base = OTHER; note = 2'-O-(2-methoxyethyl) ribonucleotide
  modified_base 3: mod_base = OTHER; note = 5-methyl cytidine
  modified_base 8..9: mod_base = OTHER; note = 5-methyl cytidine
  modified_base 14: mod_base = OTHER; note = 5-methyl cytidine
  modified_base 18: mod_base = OTHER; note = 5-methyl cytidine
  modified_base 20: mod_base = OTHER; note = 5-methyl cytidine
gactgaacctggtctggctc

SEQ ID NO: 1024 - RNA, 20 nt, synthetic construct
  source 1..20: mol_type = other RNA
  modified_base 1..20: mod_base = OTHER; note = Phosphorothioate linkage
  modified_base 1..20: mod_base = OTHER; note = 2'-O-(2-methoxyethyl) ribonucleotide
  modified_base 7: mod_base = OTHER; note = 5-methyl cytidine
  modified_base 12..13: mod_base = OTHER; note = 5-methyl cytidine
  modified_base 18: mod_base = OTHER; note = 5-methyl cytidine
tggtgactgaacctggtctg

SEQ ID NO: 1025 - RNA, 20 nt, synthetic construct
  source 1..20: mol_type = other RNA
  modified_base 1..20: mod_base = OTHER; note = Phosphorothioate linkage
  modified_base 1..20: mod_base = OTHER; note = 2'-O-(2-methoxyethyl) ribonucleotide
  modified_base 8: mod_base = OTHER; note = 5-methyl cytidine
  modified_base 13..14: mod_base = OTHER; note = 5-methyl cytidine
  modified_base 19: mod_base = OTHER; note = 5-methyl cytidine
gtggtgactgaacctggtct

SEQ ID NO: 1026 - RNA, 20 nt, synthetic construct
  source 1..20: mol_type = other RNA
  modified_base 1..20: mod_base = OTHER; note = Phosphorothioate linkage
  modified_base 1..20: mod_base = OTHER; note = 2'-O-(2-methoxyethyl) ribonucleotide
  modified_base 1: mod_base = OTHER; note = 5-methyl cytidine
  modified_base 3: mod_base = OTHER; note = 5-methyl cytidine
  modified_base 18: mod_base = OTHER; note = 5-methyl cytidine
ctcgaaggtagtagggactt

SEQ ID NO: 1027 - RNA, 20 nt, synthetic construct
  source 1..20: mol_type = other RNA
  modified_base 1..20: mod_base = OTHER; note = Phosphorothioate linkage
  modified_base 1..20: mod_base = OTHER; note = 2'-O-(2-methoxyethyl) ribonucleotide
  modified_base 3: mod_base = OTHER; note = 5-methyl cytidine
  modified_base 5: mod_base = OTHER; note = 5-methyl cytidine
  modified_base 20: mod_base = OTHER; note = 5-methyl cytidine
ttctcgaaggtagtagggac

SEQ ID NO: 1028 - RNA, 20 nt, synthetic construct
  source 1..20: mol_type = other RNA
  modified_base 1..20: mod_base = OTHER; note = Phosphorothioate linkage
  modified_base 1..20: mod_base = OTHER; note = 2'-O-(2-methoxyethyl) ribonucleotide
  modified_base 5: mod_base = OTHER; note = 5-methyl cytidine
  modified_base 8: mod_base = OTHER; note = 5-methyl cytidine
  modified_base 10: mod_base = OTHER; note = 5-methyl cytidine
ttggcttctcgaaggtagta

SEQ ID NO: 1029 - RNA, 20 nt, synthetic construct
  source 1..20: mol_type = other RNA
  modified_base 1..20: mod_base = OTHER; note = Phosphorothioate linkage
  modified_base 1..20: mod_base = OTHER; note = 2'-O-(2-methoxyethyl) ribonucleotide
  modified_base 3: mod_base = OTHER; note = 5-methyl cytidine
  modified_base 8..9: mod_base = OTHER; note = 5-methyl cytidine
  modified_base 15..16: mod_base = OTHER; note = 5-methyl cytidine
aacgagacctgagaccttgg

SEQ ID NO: 1030 - RNA, 20 nt, synthetic construct
  source 1..20: mol_type = other RNA
  modified_base 1..20: mod_base = OTHER; note = Phosphorothioate linkage
  modified_base 1..20: mod_base = OTHER; note = 2'-O-(2-methoxyethyl) ribonucleotide
  modified_base 4: mod_base = OTHER; note = 5-methyl cytidine
  modified_base 18: mod_base = OTHER; note = 5-methyl cytidine
  modified_base 20: mod_base = OTHER; note = 5-methyl cytidine
ggacttgggagtggtgactc

SEQ ID NO: 1031 - DNA, 20 bp, synthetic construct
  source 1..20: mol_type = other DNA
  modified_base 1..20: mod_base = OTHER; note = Phosphorothioate linkage
ggacttgggagtggtgacta

SEQ ID NO: 1032 - RNA, 20 nt, synthetic construct
  source 1..20: mol_type = other RNA
  modified_base 1..20: mod_base = OTHER; note = Phosphorothioate linkage
  modified_base 1..20: mod_base = OTHER; note = 2'-O-(2-methoxyethyl) ribonucleotide
  modified_base 4: mod_base = OTHER; note = 5-methyl cytidine
  modified_base 18: mod_base = OTHER; note = 5-methyl cytidine
ggacttgggagtggtgactt

SEQ ID NO: 1033 - RNA, 20 nt, synthetic construct
  source 1..20: mol_type = other RNA
  modified_base 1..20: mod_base = OTHER; note = Phosphorothioate linkage
  modified_base 1..20: mod_base = OTHER; note = 2'-O-(2-methoxyethyl) ribonucleotide
  modified_base 1: mod_base = OTHER; note = 5-methyl cytidine
  modified_base 3..4: mod_base = OTHER; note = 5-methyl cytidine
  modified_base 13: mod_base = OTHER; note = 5-methyl cytidine
  modified_base 16: mod_base = OTHER; note = 5-methyl cytidine
gccttggggggctgcggtag

SEQ ID NO: 1034 - RNA, 20 nt, synthetic construct
  source 1..20: mol_type = other RNA
  modified_base 1..20: mod_base = OTHER; note = Phosphorothioate linkage
  modified_base 1..20: mod_base = OTHER; note = 2'-O-(2-methoxyethyl) ribonucleotide
  modified_base 1: mod_base = OTHER; note = 5-methyl cytidine
  modified_base 3..4: mod_base = OTHER; note = 5-methyl cytidine
  modified_base 13: mod_base = OTHER; note = 5-methyl cytidine
  modified_base 16: mod_base = OTHER; note = 5-methyl cytidine
cgccttggggggctgcggta

SEQ ID NO: 1035 - RNA, 20 nt, synthetic construct
  source 1..20: mol_type = other RNA
  modified_base 1..20: mod_base = OTHER; note = Phosphorothioate linkage
  modified_base 1..20: mod_base = OTHER; note = 2'-O-(2-methoxyethyl) ribonucleotide
  modified_base 2: mod_base = OTHER; note = 5-methyl cytidine
  modified_base 4..5: mod_base = OTHER; note = 5-methyl cytidine
  modified_base 14: mod_base = OTHER; note = 5-methyl cytidine
  modified_base 17: mod_base = OTHER; note = 5-methyl cytidine
gcgccttggggggctgcggt

SEQ ID NO: 1036 - RNA, 20 nt, synthetic construct
  source 1..20: mol_type = other RNA
  modified_base 1..20: mod_base = OTHER; note = Phosphorothioate linkage
  modified_base 1..20: mod_base = OTHER; note = 2'-O-(2-methoxyethyl) ribonucleotide
  modified_base 3: mod_base = OTHER; note = 5-methyl cytidine
  modified_base 5..6: mod_base = OTHER; note = 5-methyl cytidine
  modified_base 15: mod_base = OTHER; note = 5-methyl cytidine
  modified_base 18: mod_base = OTHER; note = 5-methyl cytidine
agcgccttggggggctgcgg

SEQ ID NO: 1037 - RNA, 20 nt, synthetic construct
  source 1..20: mol_type = other RNA
  modified_base 1..20: mod_base = OTHER; note = Phosphorothioate linkage
  modified_base 1..20: mod_base = OTHER; note = 2'-O-(2-methoxyethyl) ribonucleotide
  modified_base 1: mod_base = OTHER; note = 5-methyl cytidine
  modified_base 4: mod_base = OTHER; note = 5-methyl cytidine
  modified_base 6..7: mod_base = OTHER; note = 5-methyl cytidine
  modified_base 16: mod_base = OTHER; note = 5-methyl cytidine
  modified_base 19: mod_base = OTHER; note = 5-methyl cytidine
cagcgccttggggggctgcg

SEQ ID NO: 1038 - RNA, 20 nt, synthetic construct
  source 1..20: mol_type = other RNA
  modified_base 1..20: mod_base = OTHER; note = Phosphorothioate linkage
  modified_base 1..20: mod_base = OTHER; note = 2'-O-(2-methoxyethyl) ribonucleotide
  modified_base 1..2: mod_base = OTHER; note = 5-methyl cytidine
  modified_base 5: mod_base = OTHER; note = 5-methyl cytidine
  modified_base 7..8: mod_base = OTHER; note = 5-methyl cytidine
  modified_base 17: mod_base = OTHER; note = 5-methyl cytidine
  modified_base 20: mod_base = OTHER; note = 5-methyl cytidine
ccagcgccttggggggctgc

SEQ ID NO: 1039 - RNA, 20 nt, synthetic construct
  source 1..20: mol_type = other RNA
  modified_base 1..20: mod_base = OTHER; note = Phosphorothioate linkage
  modified_base 1..20: mod_base = OTHER; note = 2'-O-(2-methoxyethyl) ribonucleotide
  modified_base 1: mod_base = OTHER; note = 5-methyl cytidine
  modified_base 4: mod_base = OTHER; note = 5-methyl cytidine
  modified_base 6: mod_base = OTHER; note = 5-methyl cytidine
  modified_base 12: mod_base = OTHER; note = 5-methyl cytidine
  modified_base 14: mod_base = OTHER; note = 5-methyl cytidine
  modified_base 16: mod_base = OTHER; note = 5-methyl cytidine
cagctcagtagctcacattt

SEQ ID NO: 1040 - RNA, 20 nt, synthetic construct
  source 1..20: mol_type = other RNA
  modified_base 1..20: mod_base = OTHER; note = Phosphorothioate linkage
  modified_base 1..20: mod_base = OTHER; note = 2'-O-(2-methoxyethyl) ribonucleotide
  modified_base 1..2: mod_base = OTHER; note = 5-methyl cytidine
  modified_base 5: mod_base = OTHER; note = 5-methyl cytidine
  modified_base 7: mod_base = OTHER; note = 5-methyl cytidine
  modified_base 13: mod_base = OTHER; note = 5-methyl cytidine
  modified_base 15: mod_base = OTHER; note = 5-methyl cytidine
  modified_base 17: mod_base = OTHER; note = 5-methyl cytidine
ccagctcagtagctcacatt

SEQ ID NO: 1041 - RNA, 20 nt, synthetic construct
  source 1..20: mol_type = other RNA
  modified_base 1..20: mod_base = OTHER; note = Phosphorothioate linkage
  modified_base 1..3: mod_base = OTHER; note = 2'-O-(2-methoxyethyl) ribonucleotide
  modified_base 4: mod_base = OTHER; note = locked nucleic acid
  modified_base 5: mod_base = OTHER; note = 2'-O-(2-methoxyethyl) ribonucleotide
  modified_base 6: mod_base = OTHER; note = locked nucleic acid
  modified_base 7: mod_base = OTHER; note = 2'-O-(2-methoxyethyl) ribonucleotide
  modified_base 8: mod_base = OTHER; note = locked nucleic acid
  modified_base 9: mod_base = OTHER; note = 2'-O-(2-methoxyethyl) ribonucleotide
  modified_base 10: mod_base = OTHER; note = locked nucleic acid
  modified_base 11: mod_base = OTHER; note = 2'-O-(2-methoxyethyl) ribonucleotide
  modified_base 12: mod_base = OTHER; note = locked nucleic acid
  modified_base 13: mod_base = OTHER; note = 2'-O-(2-methoxyethyl) ribonucleotide
  modified_base 14: mod_base = OTHER; note = locked nucleic acid
  modified_base 15: mod_base = OTHER; note = 2'-O-(2-methoxyethyl) ribonucleotide
  modified_base 16: mod_base = OTHER; note = locked nucleic acid
  modified_base 17: mod_base = OTHER; note = 2'-O-(2-methoxyethyl) ribonucleotide
  modified_base 18: mod_base = OTHER; note = locked nucleic acid
  modified_base 19..20: mod_base = OTHER; note = 2'-O-(2-methoxyethyl) ribonucleotide
  modified_base 3: mod_base = OTHER; note = 5-methyl cytidine
  modified_base 5: mod_base = OTHER; note = 5-methyl cytidine
  modified_base 20: mod_base = OTHER; note = 5-methyl cytidine
ttctcgaaggtagtagggac

SEQ ID NO: 1042 - RNA, 20 nt, synthetic construct
  source 1..20: mol_type = other RNA
  modified_base 1..20: mod_base = OTHER; note = Phosphorothioate linkage
  modified_base 1..2: mod_base = OTHER; note = 2'-O-(2-methoxyethyl) ribonucleotide
  modified_base 3: mod_base = OTHER; note = Locked nucleic acid
  modified_base 4: mod_base = OTHER; note = 2'-O-(2-methoxyethyl) ribonucleotide
  modified_base 5: mod_base = OTHER; note = Locked nucleic acid
  modified_base 6: mod_base = OTHER; note = 2'-O-(2-methoxyethyl) ribonucleotide
  modified_base 7: mod_base = OTHER; note = Locked nucleic acid
  modified_base 8: mod_base = OTHER; note = 2'-O-(2-methoxyethyl) ribonucleotide
  modified_base 9: mod_base = OTHER; note = Locked nucleic acid
  modified_base 10: mod_base = OTHER; note = 2'-O-(2-methoxyethyl) ribonucleotide
  modified_base 11: mod_base = OTHER; note = Locked nucleic acid
  modified_base 12: mod_base = OTHER; note = 2'-O-(2-methoxyethyl) ribonucleotide
  modified_base 13: mod_base = OTHER; note = Locked nucleic acid
  modified_base 14: mod_base = OTHER; note = 2'-O-(2-methoxyethyl) ribonucleotide
  modified_base 15: mod_base = OTHER; note = Locked nucleic acid
  modified_base 16: mod_base = OTHER; note = 2'-O-(2-methoxyethyl) ribonucleotide
  modified_base 17: mod_base = OTHER; note = Locked nucleic acid
  modified_base 18..20: mod_base = OTHER; note = 2'-O-(2-methoxyethyl) ribonucleotide
  modified_base 3: mod_base = OTHER; note = 5-methyl cytidine
  modified_base 5: mod_base = OTHER; note = 5-methyl cytidine
  modified_base 20: mod_base = OTHER; note = 5-methyl cytidine
ttctcgaaggtagtagggac

SEQ ID NO: 1043 - RNA, 20 nt, synthetic construct
  source 1..20: mol_type = other RNA
  modified_base 1..20: mod_base = OTHER; note = Phosphorothioate linkage
  modified_base 1..2: mod_base = OTHER; note = 2'-O-(2-methoxyethyl) ribonucleotide
  modified_base 3: mod_base = OTHER; note = Locked nucleic acid
  modified_base 4..5: mod_base = OTHER; note = 2'-O-(2-methoxyethyl) ribonucleotide
  modified_base 6: mod_base = OTHER; note = Locked nucleic acid
  modified_base 6..8: mod_base = OTHER; note = 2'-O-(2-methoxyethyl) ribonucleotide
  modified_base 9: mod_base = OTHER; note = Locked nucleic acid
  modified_base 10..11: mod_base = OTHER; note = 2'-O-(2-methoxyethyl) ribonucleotide
  modified_base 12: mod_base = OTHER; note = Locked nucleic acid
  modified_base 13..14: mod_base = OTHER; note = 2'-O-(2-methoxyethyl) ribonucleotide
  modified_base 15: mod_base = OTHER; note = Locked nucleic acid
  modified_base 16..17: mod_base = OTHER; note = 2'-O-(2-methoxyethyl) ribonucleotide
  modified_base 18: mod_base = OTHER; note = Locked nucleic acid
  modified_base 19..20: mod_base = OTHER; note = 2'-O-(2-methoxyethyl) ribonucleotide
  modified_base 3: mod_base = OTHER; note = 5-methyl cytidine
  modified_base 5: mod_base = OTHER; note = 5-methyl cytidine
  modified_base 20: mod_base = OTHER; note = 5-methyl cytidine
ttctcgaaggtagtagggac

SEQ ID NO: 1044 - RNA, 20 nt, synthetic construct
  source 1..20: mol_type = other RNA
  modified_base 1..20: mod_base = OTHER; note = Phosphorothioate linkage
  modified_base 1..4: mod_base = OTHER; note = 2'-O-(2-methoxyethyl) ribonucleotide
  modified_base 5: mod_base = OTHER; note = Locked nucleic acid
  modified_base 6..8: mod_base = OTHER; note = 2'-O-(2-methoxyethyl) ribonucleotide
  modified_base 9: mod_base = OTHER; note = Locked nucleic acid
  modified_base 10..12: mod_base = OTHER; note = 2'-O-(2-methoxyethyl) ribonucleotide
  modified_base 13: mod_base = OTHER; note = Locked nucleic acid
  modified_base 14..16: mod_base = OTHER; note = 2'-O-(2-methoxyethyl) ribonucleotide
  modified_base 17: mod_base = OTHER; note = Locked nucleic acid
  modified_base 18..20: mod_base = OTHER; note = 2'-O-(2-methoxyethyl) ribonucleotide
  modified_base 3: mod_base = OTHER; note = 5-methyl cytidine
  modified_base 5: mod_base = OTHER; note = 5-methyl cytidine
  modified_base 20: mod_base = OTHER; note = 5-methyl cytidine
ttctcgaaggtagtagggac

SEQ ID NO: 1045 - RNA, 20 nt, synthetic construct
  source 1..20: mol_type = other RNA
  modified_base 1..20: mod_base = OTHER; note = Phosphorothioate linkage
  modified_base 1..3: mod_base = OTHER; note = 2'-O-(2-methoxyethyl) ribonucleotide
  modified_base 4: mod_base = OTHER; note = Locked nucleic acid
  modified_base 5..7: mod_base = OTHER; note = 2'-O-(2-methoxyethyl) ribonucleotide
  modified_base 8: mod_base = OTHER; note = Locked nucleic acid
  modified_base 9..11: mod_base = OTHER; note = 2'-O-(2-methoxyethyl) ribonucleotide
  modified_base 12: mod_base = OTHER; note = Locked nucleic acid
  modified_base 13..15: mod_base = OTHER; note = 2'-O-(2-methoxyethyl) ribonucleotide
  modified_base 16: mod_base = OTHER; note = Locked nucleic acid
  modified_base 17..20: mod_base = OTHER; note = 2'-O-(2-methoxyethyl) ribonucleotide
  modified_base 3: mod_base = OTHER; note = 5-methyl cytidine
  modified_base 5: mod_base = OTHER; note = 5-methyl cytidine
  modified_base 20: mod_base = OTHER; note = 5-methyl cytidine
ttctcgaaggtagtagggac

SEQ ID NO: 1046 - RNA, 20 nt, synthetic construct
  source 1..20: mol_type = other RNA
  modified_base 1..20: mod_base = OTHER; note = Phosphorothioate linkage
  modified_base 1..3: mod_base = OTHER; note = 2'-O-(2-methoxyethyl) ribonucleotide
  modified_base 4: mod_base = OTHER; note = Locked nucleic acid
  modified_base 5..7: mod_base = OTHER; note = 2'-O-(2-methoxyethyl) ribonucleotide
  modified_base 8: mod_base = OTHER; note = Locked nucleic acid
  modified_base 9..11: mod_base = OTHER; note = 2'-O-(2-methoxyethyl) ribonucleotide
  modified_base 12: mod_base = OTHER; note = Locked nucleic acid
  modified_base 13..15: mod_base = OTHER; note = 2'-O-(2-methoxyethyl) ribonucleotide
  modified_base 16: mod_base = OTHER; note = Locked nucleic acid
  modified_base 17..20: mod_base = OTHER; note = 2'-O-(2-methoxyethyl) ribonucleotide
  modified_base 3: mod_base = OTHER; note = 5-methyl cytidine
  modified_base 5: mod_base = OTHER; note = 5-methyl cytidine
  modified_base 20: mod_base = OTHER; note = 5-methyl cytidine
ttctcgaaggtagtagggac

SEQ ID NO: 1047 - RNA, 20 nt, synthetic construct
  source 1..20: mol_type = other RNA
  modified_base 1..20: mod_base = OTHER; note = Phosphorothioate linkage
  modified_base 1..4: mod_base = OTHER; note = 2'-O-(2-methoxyethyl) ribonucleotide
  modified_base 5: mod_base = OTHER; note = Locked nucleic acid
  modified_base 6..9: mod_base = OTHER; note = 2'-O-(2-methoxyethyl) ribonucleotide
  modified_base 10: mod_base = OTHER; note = Locked nucleic acid
  modified_base 11..14: mod_base = OTHER; note = 2'-O-(2-methoxyethyl) ribonucleotide
  modified_base 15: mod_base = OTHER; note = Locked nucleic acid
  modified_base 16..20: mod_base = OTHER; note = 2'-O-(2-methoxyethyl) ribonucleotide
  modified_base 3: mod_base = OTHER; note = 5-methyl cytidine
  modified_base 5: mod_base = OTHER; note = 5-methyl cytidine
  modified_base 20: mod_base = OTHER; note = 5-methyl cytidine
ttctcgaaggtagtagggac

SEQ ID NO: 1048 - RNA, 20 nt, synthetic construct
  source 1..20: mol_type = other RNA
  modified_base 1..4: mod_base = OTHER; note = Phosphorothioate linkage
  modified_base 6..15: mod_base = OTHER; note = Phosphorothioate linkage
  modified_base 17..20: mod_base = OTHER; note = Phosphorothioate linkage
  modified_base 1..20: mod_base = OTHER; note = 2'-O-(2-methoxyethyl) ribonucleotide
  modified_base 3: mod_base = OTHER; note = 5-methyl cytidine
  modified_base 5: mod_base = OTHER; note = 5-methyl cytidine
  modified_base 20: mod_base = OTHER; note = 5-methyl cytidine
ttctcgaaggtagtagggac

SEQ ID NO: 1049 - RNA, 20 nt, synthetic construct
  source 1..20: mol_type = other RNA
  modified_base 1..3: mod_base = OTHER; note = Phosphorothioate linkage
  modified_base 6..15: mod_base = OTHER; note = Phosphorothioate linkage
  modified_base 18..20: mod_base = OTHER; note = Phosphorothioate linkage
  modified_base 1..20: mod_base = OTHER; note = 2'-O-(2-methoxyethyl) ribonucleotide
  modified_base 3: mod_base = OTHER; note = 5-methyl cytidine
  modified_base 5: mod_base = OTHER; note = 5-methyl cytidine
  modified_base 20: mod_base = OTHER; note = 5-methyl cytidine
ttctcgaaggtagtagggac

SEQ ID NO: 1050 - RNA, 20 nt, synthetic construct
  source 1..20: mol_type = other RNA
  modified_base 1..2: mod_base = OTHER; note = Phosphorothioate linkage
  modified_base 6..15: mod_base = OTHER; note = Phosphorothioate linkage
  modified_base 19..20: mod_base = OTHER; note = Phosphorothioate linkage
  modified_base 1..20: mod_base = OTHER; note = 2'-O-(2-methoxyethyl) ribonucleotide
  modified_base 3: mod_base = OTHER; note = 5-methyl cytidine
  modified_base 5: mod_base = OTHER; note = 5-methyl cytidine
  modified_base 20: mod_base = OTHER; note = 5-methyl cytidine
ttctcgaaggtagtagggac

SEQ ID NO: 1051 - RNA, 20 nt, synthetic construct
  source 1..20: mol_type = other RNA
  modified_base 6..15: mod_base = OTHER; note = Phosphorothioate linkage
  modified_base 1..20: mod_base = OTHER; note = 2'-O-(2-methoxyethyl) ribonucleotide
  modified_base 3: mod_base = OTHER; note = 5-methyl cytidine
  modified_base 5: mod_base = OTHER; note = 5-methyl cytidine
  modified_base 20: mod_base = OTHER; note = 5-methyl cytidine
ttctcgaaggtagtagggac

SEQ ID NO: 1052 - RNA, 20 nt, synthetic construct
  source 1..20: mol_type = other RNA
  modified_base 1..5: mod_base = OTHER; note = Phosphorothioate linkage
  modified_base 7..20: mod_base = OTHER; note = Phosphorothioate linkage
  modified_base 1..20: mod_base = OTHER; note = 2'-O-(2-methoxyethyl) ribonucleotide
  modified_base 3: mod_base = OTHER; note = 5-methyl cytidine
  modified_base 5: mod_base = OTHER; note = 5-methyl cytidine
  modified_base 20: mod_base = OTHER; note = 5-methyl cytidine
ttctcgaaggtagtagggac

SEQ ID NO: 1053 - RNA, 20 nt, synthetic construct
  source 1..20: mol_type = other RNA
  modified_base 1..20: mod_base = OTHER; note = Phosphorothioate linkage
  modified_base 1..3: mod_base = OTHER; note = 2'-O-(2-methoxyethyl) ribonucleotide
  modified_base 4: mod_base = OTHER; note = locked nucleic acid
  modified_base 5: mod_base = OTHER; note = 2'-O-(2-methoxyethyl) ribonucleotide
  modified_base 6: mod_base = OTHER; note = locked nucleic acid
  modified_base 7: mod_base = OTHER; note = 2'-O-(2-methoxyethyl) ribonucleotide
  modified_base 8: mod_base = OTHER; note = locked nucleic acid
  modified_base 9: mod_base = OTHER; note = 2'-O-(2-methoxyethyl) ribonucleotide
  modified_base 10: mod_base = OTHER; note = locked nucleic acid
  modified_base 11: mod_base = OTHER; note = 2'-O-(2-methoxyethyl) ribonucleotide
  modified_base 12: mod_base = OTHER; note = locked nucleic acid
  modified_base 13: mod_base = OTHER; note = 2'-O-(2-methoxyethyl) ribonucleotide
  modified_base 14: mod_base = OTHER; note = locked nucleic acid
  modified_base 15: mod_base = OTHER; note = 2'-O-(2-methoxyethyl) ribonucleotide
  modified_base 16: mod_base = OTHER; note = locked nucleic acid
  modified_base 17: mod_base = OTHER; note = 2'-O-(2-methoxyethyl) ribonucleotide
  modified_base 18: mod_base = OTHER; note = locked nucleic acid
  modified_base 19..20: mod_base = OTHER; note = 2'-O-(2-methoxyethyl) ribonucleotide
  modified_base 5: mod_base = OTHER; note = 5-methyl cytidine
  modified_base 8: mod_base = OTHER; note = 5-methyl cytidine
  modified_base 10: mod_base = OTHER; note = 5-methyl cytidine
ttggcttctcgaaggtagta

SEQ ID NO: 1054 - RNA, 20 nt, synthetic construct
  source 1..20: mol_type = other RNA
  modified_base 1..20: mod_base = OTHER; note = Phosphorothioate linkage
  modified_base 1..2: mod_base = OTHER; note = 2'-O-(2-methoxyethyl) ribonucleotide
  modified_base 3: mod_base = OTHER; note = locked nucleic acid
  modified_base 4: mod_base = OTHER; note = 2'-O-(2-methoxyethyl) ribonucleotide
  modified_base 5: mod_base = OTHER; note = locked nucleic acid
  modified_base 6: mod_base = OTHER; note = 2'-O-(2-methoxyethyl) ribonucleotide
  modified_base 7: mod_base = OTHER; note = locked nucleic acid
  modified_base 8: mod_base = OTHER; note = 2'-O-(2-methoxyethyl) ribonucleotide
  modified_base 9: mod_base = OTHER; note = locked nucleic acid
  modified_base 10: mod_base = OTHER; note = 2'-O-(2-methoxyethyl) ribonucleotide
  modified_base 11: mod_base = OTHER; note = locked nucleic acid
  modified_base 12: mod_base = OTHER; note = 2'-O-(2-methoxyethyl) ribonucleotide
  modified_base 13: mod_base = OTHER; note = locked nucleic acid
  modified_base 14: mod_base = OTHER; note = 2'-O-(2-methoxyethyl) ribonucleotide
  modified_base 15: mod_base = OTHER; note = locked nucleic acid
  modified_base 16: mod_base = OTHER; note = 2'-O-(2-methoxyethyl) ribonucleotide
  modified_base 17: mod_base = OTHER; note = locked nucleic acid
  modified_base 18..20: mod_base = OTHER; note = 2'-O-(2-methoxyethyl) ribonucleotide
  modified_base 5: mod_base = OTHER; note = 5-methyl cytidine
  modified_base 8: mod_base = OTHER; note = 5-methyl cytidine
  modified_base 10: mod_base = OTHER; note = 5-methyl cytidine
ttggcttctcgaaggtagta

SEQ ID NO: 1055 - RNA, 20 nt, synthetic construct
  source 1..20: mol_type = other RNA
  modified_base 1..20: mod_base = OTHER; note = Phosphorothioate linkage
  modified_base 1..2: mod_base = OTHER; note = 2'-O-(2-methoxyethyl) ribonucleotide
  modified_base 3: mod_base = OTHER; note = locked nucleic acid
  modified_base 4..5: mod_base = OTHER; note = 2'-O-(2-methoxyethyl) ribonucleotide
  modified_base 6: mod_base = OTHER; note = locked nucleic acid
  modified_base 7..8: mod_base = OTHER; note = 2'-O-(2-methoxyethyl) ribonucleotide
  modified_base 9: mod_base = OTHER; note = locked nucleic acid
  modified_base 10..11: mod_base = OTHER; note = 2'-O-(2-methoxyethyl) ribonucleotide
  modified_base 12: mod_base = OTHER; note = locked nucleic acid
  modified_base 13..14: mod_base = OTHER; note = 2'-O-(2-methoxyethyl) ribonucleotide
  modified_base 15: mod_base = OTHER; note = locked nucleic acid
  modified_base 16..17: mod_base = OTHER; note = 2'-O-(2-methoxyethyl) ribonucleotide
  modified_base 18: mod_base = OTHER; note = locked nucleic acid
  modified_base 19..20: mod_base = OTHER; note = 2'-O-(2-methoxyethyl) ribonucleotide
  modified_base 5: mod_base = OTHER; note = 5-methyl cytidine
  modified_base 8: mod_base = OTHER; note = 5-methyl cytidine
  modified_base 10: mod_base = OTHER; note = 5-methyl cytidine
ttggcttctcgaaggtagta

SEQ ID NO: 1056 - RNA, 20 nt, synthetic construct
  source 1..20: mol_type = other RNA
  modified_base 1..20: mod_base = OTHER; note = Phosphorothioate linkage
  modified_base 1..4: mod_base = OTHER; note = 2'-O-(2-methoxyethyl) ribonucleotide
  modified_base 5: mod_base = OTHER; note = locked nucleic acid
  modified_base 6..8: mod_base = OTHER; note = 2'-O-(2-methoxyethyl) ribonucleotide
  modified_base 9: mod_base = OTHER; note = locked nucleic acid
  modified_base 10..12: mod_base = OTHER; note = 2'-O-(2-methoxyethyl) ribonucleotide
  modified_base 13: mod_base = OTHER; note = locked nucleic acid
  modified_base 14..16: mod_base = OTHER; note = 2'-O-(2-methoxyethyl) ribonucleotide
  modified_base 17: mod_base = OTHER; note = locked nucleic acid
  modified_base 18..20: mod_base = OTHER; note = 2'-O-(2-methoxyethyl) ribonucleotide
  modified_base 5: mod_base = OTHER; note = 5-methyl cytidine
  modified_base 8: mod_base = OTHER; note = 5-methyl cytidine
  modified_base 10: mod_base = OTHER; note = 5-methyl cytidine
ttggcttctcgaaggtagta

SEQ ID NO: 1057 - RNA, 20 nt, synthetic construct
  source 1..20: mol_type = other RNA
  modified_base 1..20: mod_base = OTHER; note = Phosphorothioate linkage
  modified_base 1..3: mod_base = OTHER; note = 2'-O-(2-methoxyethyl) ribonucleotide
  modified_base 4: mod_base = OTHER; note = locked nucleic acid
  modified_base 5..7: mod_base = OTHER; note = 2'-O-(2-methoxyethyl) ribonucleotide
  modified_base 8: mod_base = OTHER; note = locked nucleic acid
  modified_base 9..11: mod_base = OTHER; note = 2'-O-(2-methoxyethyl) ribonucleotide
  modified_base 12: mod_base = OTHER; note = locked nucleic acid
  modified_base 13..15: mod_base = OTHER; note = 2'-O-(2-methoxyethyl) ribonucleotide
  modified_base 16: mod_base = OTHER; note = locked nucleic acid
  modified_base 17..20: mod_base = OTHER; note = 2'-O-(2-methoxyethyl) ribonucleotide
  modified_base 5: mod_base = OTHER; note = 5-methyl cytidine
  modified_base 8: mod_base = OTHER; note = 5-methyl cytidine
  modified_base 10: mod_base = OTHER; note = 5-methyl cytidine
ttggcttctcgaaggtagta

SEQ ID NO: 1058 - RNA, 20 nt, synthetic construct
  source 1..20: mol_type = other RNA
  modified_base 1..20: mod_base = OTHER; note = Phosphorothioate linkage
  modified_base 1..5: mod_base = OTHER; note = 2'-O-(2-methoxyethyl) ribonucleotide
  modified_base 6: mod_base = OTHER; note = locked nucleic acid
  modified_base 7..10: mod_base = OTHER; note = 2'-O-(2-methoxyethyl) ribonucleotide
  modified_base 11: mod_base = OTHER; note = locked nucleic acid
  modified_base 12..15: mod_base = OTHER; note = 2'-O-(2-methoxyethyl) ribonucleotide
  modified_base 16: mod_base = OTHER; note = locked nucleic acid
  modified_base 17..20: mod_base = OTHER; note = 2'-O-(2-methoxyethyl) ribonucleotide
  modified_base 5: mod_base = OTHER; note = 5-methyl cytidine
  modified_base 8: mod_base = OTHER; note = 5-methyl cytidine
  modified_base 10: mod_base = OTHER; note = 5-methyl cytidine
ttggcttctcgaaggtagta

SEQ ID NO: 1059 - RNA, 20 nt, synthetic construct
  source 1..20: mol_type = other RNA
  modified_base 1..20: mod_base = OTHER; note = Phosphorothioate linkage
  modified_base 1..4: mod_base = OTHER; note = 2'-O-(2-methoxyethyl) ribonucleotide
  modified_base 5: mod_base = OTHER; note = locked nucleic acid
  modified_base 6..9: mod_base = OTHER; note = 2'-O-(2-methoxyethyl) ribonucleotide
  modified_base 10: mod_base = OTHER; note = locked nucleic acid
  modified_base 11..14: mod_base = OTHER; note = 2'-O-(2-methoxyethyl) ribonucleotide
  modified_base 15: mod_base = OTHER; note = locked nucleic acid
  modified_base 16..20: mod_base = OTHER; note = 2'-O-(2-methoxyethyl) ribonucleotide
  modified_base 5: mod_base = OTHER; note = 5-methyl cytidine
  modified_base 8: mod_base = OTHER; note = 5-methyl cytidine
  modified_base 10: mod_base = OTHER; note = 5-methyl cytidine
ttggcttctcgaaggtagta

SEQ ID NO: 1060 - RNA, 20 nt, synthetic construct
  source 1..20: mol_type = other RNA
  modified_base 1..4: mod_base = OTHER; note = Phosphorothioate linkage
  modified_base 6..15: mod_base = OTHER; note = Phosphorothioate linkage
  modified_base 17..20: mod_base = OTHER; note = Phosphorothioate linkage
  modified_base 1..20: mod_base = OTHER; note = 2'-O-(2-methoxyethyl) ribonucleotide
  modified_base 5: mod_base = OTHER; note = 5-methyl cytidine
  modified_base 8: mod_base = OTHER; note = 5-methyl cytidine
  modified_base 10: mod_base = OTHER; note = 5-methyl cytidine
ttggcttctcgaaggtagta

SEQ ID NO: 1061 - RNA, 20 nt, synthetic construct
  source 1..20: mol_type = other RNA
  modified_base 1..3: mod_base = OTHER; note = Phosphorothioate linkage
  modified_base 6..15: mod_base = OTHER; note = Phosphorothioate linkage
  modified_base 18..20: mod_base = OTHER; note = Phosphorothioate linkage
  modified_base 1..20: mod_base = OTHER; note = 2'-O-(2-methoxyethyl) ribonucleotide
  modified_base 5: mod_base = OTHER; note = 5-methyl cytidine
  modified_base 8: mod_base = OTHER; note = 5-methyl cytidine
  modified_base 10: mod_base = OTHER; note = 5-methyl cytidine
ttggcttctcgaaggtagta

SEQ ID NO: 1062 - RNA, 20 nt, synthetic construct
  source 1..20: mol_type = other RNA
  modified_base 1..2: mod_base = OTHER; note = Phosphorothioate linkage
  modified_base 6..15: mod_base = OTHER; note = Phosphorothioate linkage
  modified_base 19..20: mod_base = OTHER; note = Phosphorothioate linkage
  modified_base 1..20: mod_base = OTHER; note = 2'-O-(2-methoxyethyl) ribonucleotide
  modified_base 5: mod_base = OTHER; note = 5-methyl cytidine
  modified_base 8: mod_base = OTHER; note = 5-methyl cytidine
  modified_base 10: mod_base = OTHER; note = 5-methyl cytidine
ttggcttctcgaaggtagta

SEQ ID NO: 1063 - RNA, 20 nt, synthetic construct
  source 1..20: mol_type = other RNA
  modified_base 6..15: mod_base = OTHER; note = Phosphorothioate linkage
  modified_base 1..20: mod_base = OTHER; note = 2'-O-(2-methoxyethyl) ribonucleotide
  modified_base 5: mod_base = OTHER; note = 5-methyl cytidine
  modified_base 8: mod_base = OTHER; note = 5-methyl cytidine
  modified_base 10: mod_base = OTHER; note = 5-methyl cytidine
ttggcttctcgaaggtagta

SEQ ID NO: 1064 - RNA, 20 nt, synthetic construct
  source 1..20: mol_type = other RNA
  modified_base 1..5: mod_base = OTHER; note = Phosphorothioate linkage
  modified_base 17..20: mod_base = OTHER; note = Phosphorothioate linkage
  modified_base 1..20: mod_base = OTHER; note = 2'-O-(2-methoxyethyl) ribonucleotide
  modified_base 5: mod_base = OTHER; note = 5-methyl cytidine
  modified_base 8: mod_base = OTHER; note = 5-methyl cytidine
  modified_base 10: mod_base = OTHER; note = 5-methyl cytidine
ttggcttctcgaaggtagta

SEQ ID NO: 1065 - RNA, 22 nt, synthetic construct
  source 1..22: mol_type = other RNA
  modified_base 1..22: mod_base = OTHER; note = Phosphorothioate linkage
  modified_base 1..22: mod_base = OTHER; note = 2'-O-(2-methoxyethyl) ribonucleotide
  modified_base 1: mod_base = OTHER; note = 5-methyl cytidine
  modified_base 4: mod_base = OTHER; note = 5-methyl cytidine
  modified_base 6: mod_base = OTHER; note = 5-methyl cytidine
  modified_base 21: mod_base = OTHER; note = 5-methyl cytidine
cttctcgaaggtagtagggact

SEQ ID NO: 1066 - RNA, 22 nt, synthetic construct
  source 1..22: mol_type = other RNA
  modified_base 1..22: mod_base = OTHER; note = Phosphorothioate linkage
  modified_base 1..5: mod_base = OTHER; note = 2'-O-(2-methoxyethyl) ribonucleotide
  modified_base 6: mod_base = OTHER; note = Locked nucleic acid
  modified_base 7..8: mod_base = OTHER; note = 2'-O-(2-methoxyethyl) ribonucleotide
  modified_base 9: mod_base = OTHER; note = Locked nucleic acid
  modified_base 10..13: mod_base = OTHER; note = 2'-O-(2-methoxyethyl) ribonucleotide
  modified_base 14: mod_base = OTHER; note = Locked nucleic acid
  modified_base 15..16: mod_base = OTHER; note = 2'-O-(2-methoxyethyl) ribonucleotide
  modified_base 17: mod_base = OTHER; note = Locked nucleic acid
  modified_base 18..22: mod_base = OTHER; note = 2'-O-(2-methoxyethyl) ribonucleotide
  modified_base 1: mod_base = OTHER; note = 5-methyl cytidine
  modified_base 4: mod_base = OTHER; note = 5-methyl cytidine
  modified_base 6: mod_base = OTHER; note = 5-methyl cytidine
  modified_base 21: mod_base = OTHER; note = 5-methyl cytidine
cttctcgaaggtagtagggact

SEQ ID NO: 1067 - RNA, 24 nt, synthetic construct
  source 1..24: mol_type = other RNA
  modified_base 1..24: mod_base = OTHER; note = Phosphorothioate linkage
  modified_base 1..24: mod_base = OTHER; note = 2'-O-(2-methoxyethyl) ribonucleotide
  modified_base 2: mod_base = OTHER; note = 5-methyl cytidine
  modified_base 5: mod_base = OTHER; note = 5-methyl cytidine
  modified_base 7: mod_base = OTHER; note = 5-methyl cytidine
  modified_base 22: mod_base = OTHER; note = 5-methyl cytidine
gcttctcgaaggtagtagggactt

SEQ ID NO: 1068 - RNA, 24 nt, synthetic construct
  source 1..24: mol_type = other RNA
  modified_base 1..24: mod_base = OTHER; note = Phosphorothioate linkage
  modified_base 1..4: mod_base = OTHER; note = 2'-O-(2-methoxyethyl) ribonucleotide
  modified_base 5: mod_base = OTHER; note = Locked nucleic acid
  modified_base 6..7: mod_base = OTHER; note = 2'-O-(2-methoxyethyl) ribonucleotide
  modified_base 8: mod_base = OTHER; note = Locked nucleic acid
  modified_base 9..10: mod_base = OTHER; note = 2'-O-(2-methoxyethyl) ribonucleotide
  modified_base 11: mod_base = OTHER; note = Locked nucleic acid
  modified_base 12..13: mod_base = OTHER; note = 2'-O-(2-methoxyethyl) ribonucleotide
  modified_base 14: mod_base = OTHER; note = Locked nucleic acid
  modified_base 15..16: mod_base = OTHER; note = 2'-O-(2-methoxyethyl) ribonucleotide
  modified_base 17: mod_base = OTHER; note = Locked nucleic acid
  modified_base 18..19: mod_base = OTHER; note = 2'-O-(2-methoxyethyl) ribonucleotide
  modified_base 20: mod_base = OTHER; note = Locked nucleic acid
  modified_base 21..24: mod_base = OTHER; note = 2'-O-(2-methoxyethyl) ribonucleotide
  modified_base 2: mod_base = OTHER; note = 5-methyl cytidine
  modified_base 5: mod_base = OTHER; note = 5-methyl cytidine
  modified_base 7: mod_base = OTHER; note = 5-methyl cytidine
  modified_base 22: mod_base = OTHER; note = 5-methyl cytidine
gcttctcgaaggtagtagggactt

SEQ ID NO: 1069 - RNA, 22 nt, synthetic construct
  source 1..22: mol_type = other RNA
  modified_base 1..22: mod_base = OTHER; note = Phosphorothioate linkage
  modified_base 1..22: mod_base = OTHER; note = 2'-O-(2-methoxyethyl) ribonucleotide
  modified_base 1: mod_base = OTHER; note = 5-methyl cytidine
  modified_base 6: mod_base = OTHER; note = 5-methyl cytidine
  modified_base 9: mod_base = OTHER; note = 5-methyl cytidine
  modified_base 11: mod_base = OTHER; note = 5-methyl cytidine
cttggcttctcgaaggtagtag

SEQ ID NO: 1070 - RNA, 22 nt, synthetic construct
  source 1..22: mol_type = other RNA
  modified_base 1..22: mod_base = OTHER; note = Phosphorothioate linkage
  modified_base 1..5: mod_base = OTHER; note = 2'-O-(2-methoxyethyl) ribonucleotide
  modified_base 6: mod_base = OTHER; note = Locked nucleic acid
  modified_base 7..8: mod_base = OTHER; note = 2'-O-(2-methoxyethyl) ribonucleotide
  modified_base 9: mod_base = OTHER; note = Locked nucleic acid
  modified_base 10..13: mod_base = OTHER; note = 2'-O-(2-methoxyethyl) ribonucleotide
  modified_base 14: mod_base = OTHER; note = Locked nucleic acid
  modified_base 15..16: mod_base = OTHER; note = 2'-O-(2-methoxyethyl) ribonucleotide
  modified_base 17: mod_base = OTHER; note = Locked nucleic acid
  modified_base 18..22: mod_base = OTHER; note = 2'-O-(2-methoxyethyl) ribonucleotide
  modified_base 1: mod_base = OTHER; note = 5-methyl cytidine
  modified_base 6: mod_base = OTHER; note = 5-methyl cytidine
  modified_base 9: mod_base = OTHER; note = 5-methyl cytidine
  modified_base 11: mod_base = OTHER; note = 5-methyl cytidine
cttggcttctcgaaggtagtag

SEQ ID NO: 1071 - RNA, 24 nt, synthetic construct
  source 1..24: mol_type = other RNA
  modified_base 1..24: mod_base = OTHER; note = Phosphorothioate linkage
  modified_base 1..24: mod_base = OTHER; note = 2'-O-(2-methoxyethyl) ribonucleotide
  modified_base 1..2: mod_base = OTHER; note = 5-methyl cytidine
  modified_base 7: mod_base = OTHER; note = 5-methyl cytidine
  modified_base 10: mod_base = OTHER; note = 5-methyl cytidine
  modified_base 12: mod_base = OTHER; note = 5-methyl cytidine
ccttggcttctcgaaggtagtagg

SEQ ID NO: 1072 - RNA, 24 nt, synthetic construct
  source 1..24: mol_type = other RNA
  modified_base 1..24: mod_base = OTHER; note = Phosphorothioate linkage
  modified_base 1..4: mod_base = OTHER; note = 2'-O-(2-methoxyethyl) ribonucleotide
  modified_base 5: mod_base = OTHER; note = Locked nucleic acid
  modified_base 6..7: mod_base = OTHER; note = 2'-O-(2-methoxyethyl) ribonucleotide
  modified_base 8: mod_base = OTHER; note = Locked nucleic acid
  modified_base 9..10: mod_base = OTHER; note = 2'-O-(2-methoxyethyl) ribonucleotide
  modified_base 11: mod_base = OTHER; note = Locked nucleic acid
  modified_base 12..13: mod_base = OTHER; note = 2'-O-(2-methoxyethyl) ribonucleotide
  modified_base 14: mod_base = OTHER; note = Locked nucleic acid
  modified_base 15..16: mod_base = OTHER; note = 2'-O-(2-methoxyethyl) ribonucleotide
  modified_base 17: mod_base = OTHER; note = Locked nucleic acid
  modified_base 18..19: mod_base = OTHER; note = 2'-O-(2-methoxyethyl) ribonucleotide
  modified_base 20: mod_base = OTHER; note = Locked nucleic acid
  modified_base 21..24: mod_base = OTHER; note = 2'-O-(2-methoxyethyl) ribonucleotide
  modified_base 1..2: mod_base = OTHER; note = 5-methyl cytidine
  modified_base 7: mod_base = OTHER; note = 5-methyl cytidine
  modified_base 10: mod_base = OTHER; note = 5-methyl cytidine
  modified_base 12: mod_base = OTHER; note = 5-methyl cytidine
ccttggcttctcgaaggtagtagg

SEQ ID NO: 1073 - DNA, 30 bp, synthetic construct
  source 1..30: mol_type = other DNA
  modified_base 1..30: mod_base = OTHER; note = Phosphorothioate linkage
  modified_base 1..5: mod_base = OTHER; note = 2'-O-(2-methoxyethyl) ribonucleotide
  modified_base 6: mod_base = OTHER; note = Locked nucleic acid
  modified_base 7..8: mod_base = OTHER; note = 2'-O-(2-methoxyethyl) ribonucleotide
  modified_base 9: mod_base = OTHER; note = Locked nucleic acid
  modified_base 10..11: mod_base = OTHER; note = 2'-O-(2-methoxyethyl) ribonucleotide
  modified_base 12: mod_base = OTHER; note = Locked nucleic acid
  modified_base 13..14: mod_base = OTHER; note = 2'-O-(2-methoxyethyl) ribonucleotide
  modified_base 15: mod_base = OTHER; note = Locked nucleic acid
  modified_base 16..20: mod_base = OTHER; note = 2'-O-(2-methoxyethyl) ribonucleotide
  misc_feature 21..30: note = DNA
  modified_base 4: mod_base = OTHER; note = 5-methyl cytidine
  modified_base 18: mod_base = OTHER; note = 5-methyl cytidine
ggacttgggagtggtgactgtttttttttt

SEQ ID NO: 1074 - DNA, 30 bp, synthetic construct; identical to SEQ ID NO: 1073
  source 1..30: mol_type = other DNA
  modified_base 1..5: mod_base = OTHER; note = 2'-O-(2-methoxyethyl) ribonucleotide
  modified_base 6: mod_base = OTHER; note = Locked nucleic acid
  modified_base 7..8: mod_base = OTHER; note = 2'-O-(2-methoxyethyl) ribonucleotide
  modified_base 9: mod_base = OTHER; note = Locked nucleic acid
  modified_base 10..11: mod_base = OTHER; note = 2'-O-(2-methoxyethyl) ribonucleotide
  modified_base 12: mod_base = OTHER; note = Locked nucleic acid
  modified_base 13..14: mod_base = OTHER; note = 2'-O-(2-methoxyethyl) ribonucleotide
  modified_base 15: mod_base = OTHER; note = Locked nucleic acid
  modified_base 16..20: mod_base = OTHER; note = 2'-O-(2-methoxyethyl) ribonucleotide
  misc_feature 21..30: note = DNA
  modified_base 4: mod_base = OTHER; note = 5-methyl cytidine
  modified_base 18: mod_base = OTHER; note = 5-methyl cytidine

SEQ ID NO: 1075 - DNA, 20 bp, synthetic construct
  source 1..20: mol_type = other DNA
  modified_base 1..20: mod_base = OTHER; note = Phosphorothioate linkage
  modified_base 1..5: mod_base = OTHER; note = 2'-O-(2-methoxyethyl) ribonucleotide
  misc_feature 6..15: note = DNA
  modified_base 16..20: mod_base = OTHER; note = 2'-O-(2-methoxyethyl) ribonucleotide
  modified_base 1..4: mod_base = OTHER; note = 5-methyl cytidine
  modified_base 9: mod_base = OTHER; note = 5-methyl cytidine
  modified_base 11: mod_base = OTHER; note = 5-methyl cytidine
  modified_base 13: mod_base = OTHER; note = 5-methyl cytidine
ccccttggcactcggagttg

SEQ ID NO: 1076 - DNA, 20 bp, synthetic construct
  source 1..20: mol_type = other DNA
  modified_base 1..20: mod_base = OTHER; note = Phosphorothioate linkage
  modified_base 1..5: mod_base = OTHER; note = 2'-O-(2-methoxyethyl) ribonucleotide
  misc_feature 6..15: note = DNA
  modified_base 16..20: mod_base = OTHER; note = 2'-O-(2-methoxyethyl) ribonucleotide
  modified_base 2: mod_base = OTHER; note = 5-methyl cytidine
  modified_base 5: mod_base = OTHER; note = 5-methyl cytidine
  modified_base 14: mod_base = OTHER; note = 5-methyl cytidine
  modified_base 16..19: mod_base = OTHER; note = 5-methyl cytidine
gcagctaggttggctcccct

SEQ ID NO: 1077 - DNA, 20 bp, synthetic construct
  source 1..20: mol_type = other DNA
  modified_base 1..20: mod_base = OTHER; note = Phosphorothioate linkage
  modified_base 1..5: mod_base = OTHER; note = 2'-O-(2-methoxyethyl) ribonucleotide
  misc_feature 6..15: note = DNA
  modified_base 16..20: mod_base = OTHER; note = 2'-O-(2-methoxyethyl) ribonucleotide
  modified_base 4: mod_base = OTHER; note = 5-methyl cytidine
  modified_base 13: mod_base = OTHER; note = 5-methyl cytidine
  modified_base 17: mod_base = OTHER; note = 5-methyl cytidine
ttgcgggtgggacgagctag

SEQ ID NO: 1078 - DNA, 20 bp, synthetic construct
  source 1..20: mol_type = other DNA
  modified_base 1..20: mod_base = OTHER; note = Phosphorothioate linkage
  modified_base 1..5: mod_base = OTHER; note = 2'-O-(2-methoxyethyl) ribonucleotide
  misc_feature 6..15: note = DNA
  modified_base 16..20: mod_base = OTHER; note = 2'-O-(2-methoxyethyl) ribonucleotide
  modified_base 6: mod_base = OTHER; note = 5-methyl cytidine
  modified_base 11..12: mod_base = OTHER; note = 5-methyl cytidine
  modified_base 17: mod_base = OTHER; note = 5-methyl cytidine
ggtgactgaacctggtctgg

SEQ ID NO: 1079 - DNA, 20 bp, synthetic construct
  source 1..20: mol_type = other DNA
  modified_base 1..20: mod_base = OTHER; note = Phosphorothioate linkage
  modified_base 1..5: mod_base = OTHER; note = 2'-O-(2-methoxyethyl) ribonucleotide
  misc_feature 6..15: note = DNA
  modified_base 16..20: mod_base = OTHER; note = 2'-O-(2-methoxyethyl) ribonucleotide
  modified_base 1: mod_base = OTHER; note = 5-methyl cytidine
  modified_base 16: mod_base = OTHER; note = 5-methyl cytidine
cgaaggtagtagggacttgg

SEQ ID NO: 1080 - DNA, 20 bp, synthetic construct
  source 1..20: mol_type = other DNA
  modified_base 1..20: mod_base = OTHER; note = Phosphorothioate linkage
  modified_base 1..5: mod_base = OTHER; note = 2'-O-(2-methoxyethyl) ribonucleotide
  misc_feature 6..15: note = DNA
  modified_base 16..20: mod_base = OTHER; note = 2'-O-(2-methoxyethyl) ribonucleotide
  modified_base 2: mod_base = OTHER; note = 5-methyl cytidine
  modified_base 7..8: mod_base = OTHER; note = 5-methyl cytidine
  modified_base 14..15: mod_base = OTHER; note = 5-methyl cytidine
  modified_base 20: mod_base = OTHER; note = 5-methyl cytidine
acgagacctgagaccttggc

SEQ ID NO: 1081 - DNA, 20 bp, synthetic construct
  source 1..20: mol_type = other DNA
  modified_base 1..20: mod_base = OTHER; note = Phosphorothioate linkage
  modified_base 1..5: mod_base = OTHER; note = 2'-O-(2-methoxyethyl) ribonucleotide
  misc_feature 6..15: note = DNA
  modified_base 16..20: mod_base = OTHER; note = 2'-O-(2-methoxyethyl) ribonucleotide
  modified_base 7: mod_base = OTHER; note = 5-methyl cytidine
  modified_base 11: mod_base = OTHER; note = 5-methyl cytidine
  modified_base 14: mod_base = OTHER; note = 5-methyl cytidine
  modified_base 17..20: mod_base = OTHER; note = 5-methyl cytidine
taggtgctggcttcttcccc

SEQ ID NO: 1082 - DNA, 20 bp, synthetic construct
  source 1..20: mol_type = other DNA
  modified_base 1..20: mod_base = OTHER; note = Phosphorothioate linkage
  modified_base 1..5: mod_base = OTHER; note = 2'-O-(2-methoxyethyl) ribonucleotide
  misc_feature 6..15: note = DNA
  modified_base 16..20: mod_base = OTHER; note = 2'-O-(2-methoxyethyl) ribonucleotide
  modified_base 2..3: mod_base = OTHER; note = 5-methyl cytidine
  modified_base 7: mod_base = OTHER; note = 5-methyl cytidine
  modified_base 12..14: mod_base = OTHER; note = 5-methyl cytidine
  modified_base 17: mod_base = OTHER; note = 5-methyl cytidine
  modified_base 19..20: mod_base = OTHER; note = 5-methyl cytidine
accattcttgacccagctcc

SEQ ID NO: 1083 - DNA, 20 bp, synthetic construct
  source 1..20: mol_type = other DNA
  modified_base 1..20: mod_base = OTHER; note = Phosphorothioate linkage
  modified_base 1..5: mod_base = OTHER; note = 2'-O-(2-methoxyethyl) ribonucleotide
  misc_feature 6..15: note = DNA
  modified_base 16..20: mod_base = OTHER; note = 2'-O-(2-methoxyethyl) ribonucleotide
  modified_base 2: mod_base = OTHER; note = 5-methyl cytidine
  modified_base 8: mod_base = OTHER; note = 5-methyl cytidine
  modified_base 10..13: mod_base = OTHER; note = 5-methyl cytidine
gcagtgacgccccgttagaa

SEQ ID NO: 1084 - DNA, 20 bp, synthetic construct
  source 1..20: mol_type = other DNA
  modified_base 1..20: mod_base = OTHER; note = Phosphorothioate linkage
  modified_base 1..5: mod_base = OTHER; note = 2'-O-(2-methoxyethyl) ribonucleotide
  misc_feature 6..15: note = DNA
  modified_base 16..20: mod_base = OTHER; note = 2'-O-(2-methoxyethyl) ribonucleotide
  modified_base 5: mod_base = OTHER; note = 5-methyl cytidine
  modified_base 8: mod_base = OTHER; note = 5-methyl cytidine
  modified_base 16..17: mod_base = OTHER; note = 5-methyl cytidine
  modified_base 19: mod_base = OTHER; note = 5-methyl cytidine
gagacaacagaagaaccgct

SEQ ID NO: 1085 - DNA, 20 bp, synthetic construct
  source 1..20: mol_type = other DNA
  modified_base 1..20: mod_base = OTHER; note = Phosphorothioate linkage
  modified_base 1..5: mod_base = OTHER; note = 2'-O-(2-methoxyethyl) ribonucleotide
  misc_feature 6..15: note = DNA
  modified_base 16..20: mod_base = OTHER; note = 2'-O-(2-methoxyethyl) ribonucleotide
  modified_base 2..3: mod_base = OTHER; note = 5-methyl cytidine
  modified_base 11: mod_base = OTHER; note = 5-methyl cytidine
  modified_base 20: mod_base = OTHER; note = 5-methyl cytidine
gccatgtgagcttgaggttc

SEQ ID NO: 1086 - DNA, 20 bp, synthetic construct
  source 1..20: mol_type = other DNA
  modified_base 1..20: mod_base = OTHER; note = Phosphorothioate linkage
  modified_base 1..5: mod_base = OTHER; note = 2'-O-(2-methoxyethyl) ribonucleotide
  misc_feature 6..15: note = DNA
  modified_base 16..20: mod_base = OTHER; note = 2'-O-(2-methoxyethyl) ribonucleotide
  modified_base 6: mod_base = OTHER; note = 5-methyl cytidine
  modified_base 10: mod_base = OTHER; note = 5-methyl cytidine
  modified_base 12: mod_base = OTHER; note = 5-methyl cytidine
ggagtcggacgcaggtagga

SEQ ID NO: 1087 - DNA, 20 bp, synthetic construct
  source 1..20: mol_type = other DNA
  modified_base 1..20: mod_base = OTHER; note = Phosphorothioate linkage
  modified_base 1..5: mod_base = OTHER; note = 2'-O-(2-methoxyethyl) ribonucleotide
  misc_feature 6..15: note = DNA
  modified_base 16..20: mod_base = OTHER; note = 2'-O-(2-methoxyethyl) ribonucleotide
  modified_base 5: mod_base = OTHER; note = 5-methyl cytidine
  modified_base 12: mod_base = OTHER; note = 5-methyl cytidine
  modified_base 17: mod_base = OTHER; note = 5-methyl cytidine
  modified_base 19: mod_base = OTHER; note = 5-methyl cytidine
gggtctgtagtctgagcgct

SEQ ID NO: 1088 - DNA, 20 bp, synthetic construct
  source 1..20: mol_type = other DNA
  modified_base 1..20: mod_base = OTHER; note = Phosphorothioate linkage
  modified_base 1..5: mod_base = OTHER; note = 2'-O-(2-methoxyethyl) ribonucleotide
  misc_feature 6..15: note = DNA
  modified_base 16..20: mod_base = OTHER; note = 2'-O-(2-methoxyethyl) ribonucleotide
  modified_base 7: mod_base = OTHER; note = 5-methyl cytidine
  modified_base 17: mod_base = OTHER; note = 5-methyl cytidine
tggaaactgaggtaggcggg

SEQ ID NO: 1089 - DNA, 20 bp, synthetic construct
  source 1..20: mol_type = other DNA
  modified_base 1..20: mod_base = OTHER; note = Phosphorothioate linkage
  modified_base 1..5: mod_base = OTHER; note = 2'-O-(2-methoxyethyl) ribonucleotide
  misc_feature 6..15: note = DNA
  modified_base 16..20: mod_base = OTHER; note = 2'-O-(2-methoxyethyl) ribonucleotide
  modified_base 3..4: mod_base = OTHER; note = 5-methyl cytidine
  modified_base 13: mod_base = OTHER; note = 5-methyl cytidine
  modified_base 20: mod_base = OTHER; note = 5-methyl cytidine
agccaatgggagcgggtagc

SEQ ID NO: 1090 - DNA, 20 bp, synthetic construct
  source 1..20: mol_type = other DNA
  modified_base 1..20: mod_base = OTHER; note = Phosphorothioate linkage
  modified_base 1..5: mod_base = OTHER; note = 2'-O-(2-methoxyethyl) ribonucleotide
  misc_feature 6..15: note = DNA
  modified_base 16..20: mod_base = OTHER; note = 2'-O-(2-methoxyethyl) ribonucleotide
  modified_base 3: mod_base = OTHER; note = 5-methyl cytidine
  modified_base 7..10: mod_base = OTHER; note = 5-methyl cytidine
  modified_base 12..13: mod_base = OTHER; note = 5-methyl cytidine
  modified_base 15: mod_base = OTHER; note = 5-methyl cytidine
ggctggccccacctctatat

SEQ ID NO: 1091 - DNA, 20 bp, synthetic construct
  source 1..20: mol_type = other DNA
  modified_base 1..20: mod_base = OTHER; note = Phosphorothioate linkage
  modified_base 1..5: mod_base = OTHER; note = 2'-O-(2-methoxyethyl) ribonucleotide
  misc_feature 6..15: note = DNA
  modified_base 16..20: mod_base = OTHER; note = 2'-O-(2-methoxyethyl) ribonucleotide
aggagagtgatttgagtaga

SEQ ID NO: 1092 - DNA, 20 bp, synthetic construct
  source 1..20: mol_type = other DNA
  modified_base 1..20: mod_base = OTHER; note = Phosphorothioate linkage
  modified_base 1..5: mod_base = OTHER; note = 2'-O-(2-methoxyethyl) ribonucleotide
  misc_feature 6..15: note = DNA
  modified_base 16..20: mod_base = OTHER; note = 2'-O-(2-methoxyethyl) ribonucleotide
  modified_base 2: mod_base = OTHER; note = 5-methyl cytidine
  modified_base 6..8: mod_base = OTHER; note = 5-methyl cytidine
  modified_base 11: mod_base = OTHER; note = 5-methyl cytidine
  modified_base 14: mod_base = OTHER; note = 5-methyl cytidine
  modified_base 16: mod_base = OTHER; note = 5-methyl cytidine
gctgtcccgacgtcacatga

SEQ ID NO: 1093 - DNA, 20 bp, synthetic construct
  source 1..20: mol_type = other DNA
  modified_base 1..20: mod_base = OTHER; note = Phosphorothioate linkage
  modified_base 1..5: mod_base = OTHER; note = 2'-O-(2-methoxyethyl) ribonucleotide
  misc_feature 6..15: note = DNA
  modified_base 16..20: mod_base = OTHER; note = 2'-O-(2-methoxyethyl) ribonucleotide
  modified_base 14: mod_base = OTHER; note = 5-methyl cytidine
  modified_base 17: mod_base = OTHER; note = 5-methyl cytidine
gggttaaggaaggcgacgag

SEQ ID NO: 1094 - DNA, 20 bp, synthetic construct
  source 1..20: mol_type = other DNA
  modified_base 1..20: mod_base = OTHER; note = Phosphorothioate linkage
  modified_base 1..5: mod_base = OTHER; note = 2'-O-(2-methoxyethyl) ribonucleotide
  misc_feature 6..15: note = DNA
  modified_base 16..20: mod_base = OTHER; note = 2'-O-(2-methoxyethyl) ribonucleotide
  modified_base 4: mod_base = OTHER; note = 5-methyl cytidine
  modified_base 8: mod_base = OTHER; note = 5-methyl cytidine
  modified_base 10..14: mod_base = OTHER; note = 5-methyl cytidine
  modified_base 18: mod_base = OTHER; note = 5-methyl cytidine
  modified_base 20: mod_base = OTHER; note = 5-methyl cytidine
tagcaaactcccccaggcgc

SEQ ID NO: 1095 - DNA, 20 bp, synthetic construct
  source 1..20: mol_type = other DNA
  modified_base 1..20: mod_base = OTHER; note = Phosphorothioate linkage
  modified_base 1..5: mod_base = OTHER; note = 2'-O-(2-methoxyethyl) ribonucleotide
  misc_feature 6..15: note = DNA
  modified_base 16..20: mod_base = OTHER; note = 2'-O-(2-methoxyethyl) ribonucleotide
  modified_base 2..5: mod_base = OTHER; note = 5-methyl cytidine
  modified_base 9: mod_base = OTHER; note = 5-methyl cytidine
  modified_base 11: mod_base = OTHER; note = 5-methyl cytidine
  modified_base 13: mod_base = OTHER; note = 5-methyl cytidine
  modified_base 15: mod_base = OTHER; note = 5-methyl cytidine
  modified_base 19: mod_base = OTHER; note = 5-methyl cytidine
gccccagacacgcgctatca

SEQ ID NO: 1096 - DNA, 20 bp, synthetic construct
  source 1..20: mol_type = other DNA
  modified_base 1..20: mod_base = OTHER; note = Phosphorothioate linkage
  modified_base 1..5: mod_base = OTHER; note = 2'-O-(2-methoxyethyl) ribonucleotide
  misc_feature 6..15: note = DNA
  modified_base 16..20: mod_base = OTHER; note = 2'-O-(2-methoxyethyl) ribonucleotide
  modified_base 3: mod_base = OTHER; note = 5-methyl cytidine
  modified_base 19: mod_base = OTHER; note = 5-methyl cytidine
ggcaggataggataggagcg

SEQ ID NO: 1097 - DNA, 20 bp, synthetic construct
  source 1..20: mol_type = other DNA
  modified_base 1..20: mod_base = OTHER; note = Phosphorothioate linkage
  modified_base 1..5: mod_base = OTHER; note = 2'-O-(2-methoxyethyl) ribonucleotide
  misc_feature 6..15: note = DNA
  modified_base 16..20: mod_base = OTHER; note = 2'-O-(2-methoxyethyl) ribonucleotide
  modified_base 3..4: mod_base = OTHER; note = 5-methyl cytidine
  modified_base 8: mod_base = OTHER; note = 5-methyl cytidine
  modified_base 13: mod_base = OTHER; note = 5-methyl cytidine
  modified_base 16..17: mod_base = OTHER; note = 5-methyl cytidine
tgcctagcatgtcaaccgag

SEQ ID NO: 1098 - DNA, 20 bp, synthetic construct
  source 1..20: mol_type = other DNA
  modified_base 1..20: mod_base = OTHER; note = Phosphorothioate linkage
  modified_base 1..5: mod_base = OTHER; note = 2'-O-(2-methoxyethyl) ribonucleotide
  misc_feature 6..15: note = DNA
  modified_base 16..20: mod_base = OTHER; note = 2'-O-(2-methoxyethyl) ribonucleotide
  modified_base 1: mod_base = OTHER; note = 5-methyl cytidine
  modified_base 4..5: mod_base = OTHER; note = 5-methyl cytidine
  modified_base 8: mod_base = OTHER; note = 5-methyl cytidine
  modified_base 11: mod_base = OTHER; note = 5-methyl cytidine
  modified_base 13: mod_base = OTHER; note = 5-methyl cytidine
  modified_base 15: mod_base = OTHER; note = 5-methyl cytidine
  modified_base 17: mod_base = OTHER; note = 5-methyl cytidine
catccttcaactcactctgg

SEQ ID NO: 1099 - DNA, 20 bp, synthetic construct
  source 1..20: mol_type = other DNA
  modified_base 1..20: mod_base = OTHER; note = Phosphorothioate linkage
  modified_base 1..5: mod_base = OTHER; note = 2'-O-(2-methoxyethyl) ribonucleotide
  misc_feature 6..15: note = DNA
  modified_base 16..20: mod_base = OTHER; note = 2'-O-(2-methoxyethyl) ribonucleotide
  modified_base 3: mod_base = OTHER; note = 5-methyl cytidine
  modified_base 11: mod_base = OTHER; note = 5-methyl cytidine
  modified_base 17..18: mod_base = OTHER; note = 5-methyl cytidine
ggctgtttatctttgtcctg

SEQ ID NO: 1100 - DNA, 20 bp, synthetic construct
  source 1..20: mol_type = other DNA
  modified_base 1..20: mod_base = OTHER; note = Phosphorothioate linkage
  modified_base 1..5: mod_base = OTHER; note = 2'-O-(2-methoxyethyl) ribonucleotide
  misc_feature 6..15: note = DNA
  modified_base 16..20: mod_base = OTHER; note = 2'-O-(2-methoxyethyl) ribonucleotide
  modified_base 4..5: mod_base = OTHER; note = 5-methyl cytidine
  modified_base 8: mod_base = OTHER; note = 5-methyl cytidine
  modified_base 13: mod_base = OTHER; note = 5-methyl cytidine
  modified_base 15..16: mod_base = OTHER; note = 5-methyl cytidine
tgtcctgctgagcaccttga

SEQ ID NO: 1101 - DNA, 20 bp, synthetic construct
  source 1..20: mol_type = other DNA
  modified_base 1..20: mod_base = OTHER; note = Phosphorothioate linkage
  modified_base 1..5: mod_base = OTHER; note = 2'-O-(2-methoxyethyl) ribonucleotide
  misc_feature 6..15: note = DNA
  modified_base 16..20: mod_base = OTHER; note = 2'-O-(2-methoxyethyl) ribonucleotide
  modified_base 5: mod_base = OTHER; note = 5-methyl cytidine
  modified_base 8..9: mod_base = OTHER; note = 5-methyl cytidine
  modified_base 15: mod_base = OTHER; note = 5-methyl cytidine
  modified_base 19: mod_base = OTHER; note = 5-methyl cytidine
gattcagcctgagactgtct

SEQ ID NO: 1102 - DNA, 20 bp, synthetic construct
  source 1..20: mol_type = other DNA
  modified_base 1..20: mod_base = OTHER; note = Phosphorothioate linkage
  modified_base 1..5: mod_base = OTHER; note = 2'-O-(2-methoxyethyl) ribonucleotide
  misc_feature 6..15: note = DNA
  modified_base 16..20: mod_base = OTHER; note = 2'-O-(2-methoxyethyl) ribonucleotide
  modified_base 2: mod_base = OTHER; note = 5-methyl cytidine
  modified_base 5: mod_base = OTHER; note = 5-methyl cytidine
  modified_base 9: mod_base = OTHER; note = 5-methyl cytidine
  modified_base 11: mod_base = OTHER; note = 5-methyl cytidine
  modified_base 13: mod_base = OTHER; note = 5-methyl cytidine
  modified_base 16..17: mod_base = OTHER; note = 5-methyl cytidine
gcaactggcgcacaaccttg

SEQ ID NO: 1103 - DNA, 20 bp, synthetic construct
  source 1..20: mol_type = other DNA
  modified_base 1..20: mod_base = OTHER; note = Phosphorothioate linkage
  modified_base 1..5: mod_base = OTHER; note = 2'-O-(2-methoxyethyl) ribonucleotide
  misc_feature 6..15: note = DNA
  modified_base 16..20: mod_base = OTHER; note = 2'-O-(2-methoxyethyl) ribonucleotide
  modified_base 3: mod_base = OTHER; note = 5-methyl cytidine
  modified_base 7: mod_base = OTHER; note = 5-methyl cytidine
  modified_base 10: mod_base = OTHER; note = 5-methyl cytidine
  modified_base 13..14: mod_base = OTHER; note = 5-methyl cytidine
  modified_base 16: mod_base = OTHER; note = 5-methyl cytidine
  modified_base 18..20: mod_base = OTHER; note = 5-methyl cytidine
gacaatctacttcctctccc

SEQ ID NO: 1104 - DNA, 20 bp, synthetic construct
  source 1..20: mol_type = other DNA
  modified_base 1..20: mod_base = OTHER; note = Phosphorothioate linkage
  modified_base 1..5: mod_base = OTHER; note = 2'-O-(2-methoxyethyl) ribonucleotide
  misc_feature 6..15: note = DNA
  modified_base 16..20: mod_base = OTHER; note = 2'-O-(2-methoxyethyl) ribonucleotide
  modified_base 4: mod_base = OTHER; note = 5-methyl cytidine
  modified_base 7..9: mod_base = OTHER; note = 5-methyl cytidine
  modified_base 13: mod_base = OTHER; note = 5-methyl cytidine
  modified_base 15: mod_base = OTHER; note = 5-methyl cytidine
  modified_base 18: mod_base = OTHER; note = 5-methyl cytidine
  modified_base 20: mod_base = OTHER; note = 5-methyl cytidine
aatcttcccagactcagctc

SEQ ID NO: 1105 - DNA, 20 bp, synthetic construct
  source 1..20: mol_type = other DNA
  modified_base 1..20: mod_base = OTHER; note = Phosphorothioate linkage
  modified_base 1..5: mod_base = OTHER; note = 2'-O-(2-methoxyethyl) ribonucleotide
  misc_feature 6..15: note = DNA
  modified_base 16..20: mod_base = OTHER; note = 2'-O-(2-methoxyethyl) ribonucleotide
  modified_base 2: mod_base = OTHER; note = 5-methyl cytidine
  modified_base 4: mod_base = OTHER; note = 5-methyl cytidine
  modified_base 7..9: mod_base = OTHER; note = 5-methyl cytidine
  modified_base 12: mod_base = OTHER; note = 5-methyl cytidine
  modified_base 14..15: mod_base = OTHER; note = 5-methyl cytidine
  modified_base 17..18: mod_base = OTHER; note = 5-methyl cytidine
  modified_base 20: mod_base = OTHER; note = 5-methyl cytidine
gctcttcccaacacctcctc

SEQ ID NO: 1106 - DNA, 20 bp, synthetic construct
  source 1..20: mol_type = other DNA
  modified_base 1..20: mod_base = OTHER; note = Phosphorothioate linkage
  modified_base 1..5: mod_base = OTHER; note = 2'-O-(2-methoxyethyl) ribonucleotide
  misc_feature 6..15: note = DNA
  modified_base 16..20: mod_base = OTHER; note = 2'-O-(2-methoxyethyl) ribonucleotide
  modified_base 2..3: mod_base = OTHER; note = 5-methyl cytidine
  modified_base 6..8: mod_base = OTHER; note = 5-methyl cytidine
  modified_base 11..13: mod_base = OTHER; note = 5-methyl cytidine
  modified_base 16: mod_base = OTHER; note = 5-methyl cytidine
gcctgcccttcccatctggt

SEQ ID NO: 1107 - DNA, 20 bp, synthetic construct
  source 1..20: mol_type = other DNA
  modified_base 1..20: mod_base = OTHER; note = Phosphorothioate linkage
  modified_base 1..5: mod_base = OTHER; note = 2'-O-(2-methoxyethyl) ribonucleotide
  misc_feature 6..15: note = DNA
  modified_base 16..20: mod_base = OTHER; note = 2'-O-(2-methoxyethyl) ribonucleotide
  modified_base 6: mod_base = OTHER; note = 5-methyl cytidine
  modified_base 14..15: mod_base = OTHER; note = 5-methyl cytidine
  modified_base 17: mod_base = OTHER; note = 5-methyl cytidine
  modified_base 20: mod_base = OTHER; note = 5-methyl cytidine
ggagactaggaagccacttc

SEQ ID NO: 1108 - DNA, 20 bp, synthetic construct
  source 1..20: mol_type = other DNA
  modified_base 1..20: mod_base = OTHER; note = Phosphorothioate linkage
  modified_base 1..5: mod_base = OTHER; note = 2'-O-(2-methoxyethyl) ribonucleotide
  misc_feature 6..15: note = DNA
  modified_base 16..20: mod_base = OTHER; note = 2'-O-(2-methoxyethyl) ribonucleotide
  modified_base 5: mod_base = OTHER; note = 5-methyl cytidine
  modified_base 10..11: mod_base = OTHER; note = 5-methyl cytidine
  modified_base 13: mod_base = OTHER; note = 5-methyl cytidine
  modified_base 19: mod_base = OTHER; note = 5-methyl cytidine
atatcaattcctcgaaggca

SEQ ID NO: 1109 - DNA, 20 bp, synthetic construct
  source 1..20: mol_type = other DNA
  modified_base 1..20: mod_base = OTHER; note = Phosphorothioate linkage
  modified_base 1..5: mod_base = OTHER; note = 2'-O-(2-methoxyethyl) ribonucleotide
  misc_feature 6..15: note = DNA
  modified_base 16..20: mod_base = OTHER; note = 2'-O-(2-methoxyethyl) ribonucleotide
  modified_base 3: mod_base = OTHER; note = 5-methyl cytidine
  modified_base 8: mod_base = OTHER; note = 5-methyl cytidine
  modified_base 13: mod_base = OTHER; note = 5-methyl cytidine
ggctaatctgttctgtggta

SEQ ID NO: 1110 - DNA, 20 bp, synthetic construct
  source 1..20: mol_type = other DNA
  modified_base 1..20: mod_base = OTHER; note = Phosphorothioate linkage
  modified_base 1..5: mod_base = OTHER; note = 2'-O-(2-methoxyethyl) ribonucleotide
  misc_feature 6..15: note = DNA
  modified_base 16..20: mod_base = OTHER; note = 2'-O-(2-methoxyethyl) ribonucleotide
  modified_base 1: mod_base = OTHER; note = 5-methyl cytidine
  modified_base 5..7: mod_base = OTHER; note = 5-methyl cytidine
  modified_base 10: mod_base = OTHER; note = 5-methyl cytidine
  modified_base 12..14: mod_base = OTHER; note = 5-methyl cytidine
  modified_base 17: mod_base = OTHER; note = 5-methyl cytidine
  modified_base 20: mod_base = OTHER; note = 5-methyl cytidine
ctggcccatctcccatcatc

SEQ ID NO: 1111 - DNA, 20 bp, synthetic construct
  source 1..20: mol_type = other DNA
  modified_base 1..20: mod_base = OTHER; note = Phosphorothioate linkage
  modified_base 1..5: mod_base = OTHER; note = 2'-O-(2-methoxyethyl) ribonucleotide
  misc_feature 6..15: note = DNA
  modified_base 16..20: mod_base = OTHER; note = 2'-O-(2-methoxyethyl) ribonucleotide
  modified_base 4..5: mod_base = OTHER; note = 5-methyl cytidine
  modified_base 7..8: mod_base = OTHER; note = 5-methyl cytidine
  modified_base 10: mod_base = OTHER; note = 5-methyl cytidine
  modified_base 13..15: mod_base = OTHER; note = 5-methyl cytidine
gttcctccacggcccagtat

SEQ ID NO: 1112 - DNA, 20 bp, synthetic construct
  source 1..20: mol_type = other DNA
  modified_base 1..20: mod_base = OTHER; note = Phosphorothioate linkage
  modified_base 1..5: mod_base = OTHER; note = 2'-O-(2-methoxyethyl) ribonucleotide
  misc_feature 6..15: note = DNA
  modified_base 16..20: mod_base = OTHER; note = 2'-O-(2-methoxyethyl) ribonucleotide
  modified_base 2: mod_base = OTHER; note = 5-methyl cytidine
  modified_base 5: mod_base = OTHER; note = 5-methyl cytidine
  modified_base 8: mod_base = OTHER; note = 5-methyl cytidine
  modified_base 12: mod_base = OTHER; note = 5-methyl cytidine
  modified_base 14..15: mod_base = OTHER; note = 5-methyl cytidine
  modified_base 18..20: mod_base = OTHER; note = 5-methyl cytidine
gctgcagcagtctccatccc

SEQ ID NO: 1113 - DNA, 20 bp, synthetic construct
  source 1..20: mol_type = other DNA
  modified_base 1..20: mod_base = OTHER; note = Phosphorothioate linkage
  modified_base 1..5: mod_base = OTHER; note = 2'-O-(2-methoxyethyl) ribonucleotide
  misc_feature 6..15: note = DNA
  modified_base 16..20: mod_base = OTHER; note = 2'-O-(2-methoxyethyl) ribonucleotide
  modified_base 3..4: mod_base = OTHER; note = 5-methyl cytidine
  modified_base 6: mod_base = OTHER; note = 5-methyl cytidine
  modified_base 9: mod_base = OTHER; note = 5-methyl cytidine
  modified_base 11..12: mod_base = OTHER; note = 5-methyl cytidine
  modified_base 17..18: mod_base = OTHER; note = 5-methyl cytidine
atcctcagctccagttcctt

SEQ ID NO: 1114 - DNA, 20 bp, synthetic construct
  source 1..20: mol_type = other DNA
  modified_base 1..20: mod_base = OTHER; note = Phosphorothioate linkage
  modified_base 1..5: mod_base = OTHER; note = 2'-O-(2-methoxyethyl) ribonucleotide
  misc_feature 6..15: note = DNA
  modified_base 16..20: mod_base = OTHER; note = 2'-O-(2-methoxyethyl) ribonucleotide
  modified_base 1: mod_base = OTHER; note = 5-methyl cytidine
  modified_base 4: mod_base = OTHER; note = 5-methyl cytidine
  modified_base 7: mod_base = OTHER; note = 5-methyl cytidine
  modified_base 10: mod_base = OTHER; note = 5-methyl cytidine
  modified_base 13..14: mod_base = OTHER; note = 5-methyl cytidine
  modified_base 16: mod_base = OTHER; note = 5-methyl cytidine
  modified_base 20: mod_base = OTHER; note = 5-methyl cytidine
cgacttctgctgcctcgagc

SEQ ID NO: 1115 - DNA, 20 bp, synthetic construct
  source 1..20: mol_type = other DNA
  modified_base 1..20: mod_base = OTHER; note = Phosphorothioate linkage
  modified_base 1..5: mod_base = OTHER; note = 2'-O-(2-methoxyethyl) ribonucleotide
  misc_feature 6..15: note = DNA
  modified_base 16..20: mod_base = OTHER; note = 2'-O-(2-methoxyethyl) ribonucleotide
  modified_base 2: mod_base = OTHER; note = 5-methyl cytidine
  modified_base 9: mod_base = OTHER; note = 5-methyl cytidine
  modified_base 11..13: mod_base = OTHER; note = 5-methyl cytidine
  modified_base 17..19: mod_base = OTHER; note = 5-methyl cytidine
tcggttggcaccctttccct

SEQ ID NO: 1116 - DNA, 20 bp, synthetic construct
  source 1..20: mol_type = other DNA
  modified_base 1..20: mod_base = OTHER; note = Phosphorothioate linkage
  modified_base 1..5: mod_base = OTHER; note = 2'-O-(2-methoxyethyl) ribonucleotide
  misc_feature 6..15: note = DNA
  modified_base 16..20: mod_base = OTHER; note = 2'-O-(2-methoxyethyl) ribonucleotide
  modified_base 2..3: mod_base = OTHER; note = 5-methyl cytidine
  modified_base 7: mod_base = OTHER; note = 5-methyl cytidine
  modified_base 14..17: mod_base = OTHER; note = 5-methyl cytidine
  modified_base 20: mod_base = OTHER; note = 5-methyl cytidine
tccaggcttagaacccctgc

SEQ ID NO: 1117 - DNA, 20 bp, synthetic construct
  source 1..20: mol_type = other DNA
  modified_base 1..20: mod_base = OTHER; note = Phosphorothioate linkage
  modified_base 1..5: mod_base = OTHER; note = 2'-O-(2-methoxyethyl) ribonucleotide
  misc_feature 6..15: note = DNA
  modified_base 16..20: mod_base = OTHER; note = 2'-O-(2-methoxyethyl) ribonucleotide
  modified_base 4: mod_base = OTHER; note = 5-methyl cytidine
  modified_base 9..10: mod_base = OTHER; note = 5-methyl cytidine
  modified_base 12: mod_base = OTHER; note = 5-methyl cytidine
  modified_base 16: mod_base = OTHER; note = 5-methyl cytidine
tgtcttatccgctgtctggg

SEQ ID NO: 1118 - DNA, 20 bp, synthetic construct
  source 1..20: mol_type = other DNA
  modified_base 1..20: mod_base = OTHER; note = Phosphorothioate linkage
  modified_base 1..5: mod_base = OTHER; note = 2'-O-(2-methoxyethyl) ribonucleotide
  misc_feature 6..15: note = DNA
  modified_base 16..20: mod_base = OTHER; note = 2'-O-(2-methoxyethyl) ribonucleotide
  modified_base 3: mod_base = OTHER; note = 5-methyl cytidine
  modified_base 5: mod_base = OTHER; note = 5-methyl cytidine
  modified_base 9: mod_base = OTHER; note = 5-methyl cytidine
  modified_base 15: mod_base = OTHER; note = 5-methyl cytidine
ggcacagactagtactaggt

SEQ ID NO: 1119 - DNA, 20 bp, synthetic construct
  source 1..20: mol_type = other DNA
  modified_base 1..20: mod_base = OTHER; note = Phosphorothioate linkage
  modified_base 1..5: mod_base = OTHER; note = 2'-O-(2-methoxyethyl) ribonucleotide
  misc_feature 6..15: note = DNA
  modified_base 16..20: mod_base = OTHER; note = 2'-O-(2-methoxyethyl) ribonucleotide
  modified_base 1: mod_base = OTHER; note = 5-methyl cytidine
  modified_base 6: mod_base = OTHER; note = 5-methyl cytidine
  modified_base 8: mod_base = OTHER; note = 5-methyl cytidine
  modified_base 15: mod_base = OTHER; note = 5-methyl cytidine
  modified_base 17: mod_base = OTHER; note = 5-methyl cytidine
ctagtctcaagatacacagg

SEQ ID NO: 1120 - DNA, 20 bp, synthetic construct
  source 1..20: mol_type = other DNA
  modified_base 1..20: mod_base = OTHER; note = Phosphorothioate linkage
  modified_base 1..5: mod_base = OTHER; note = 2'-O-(2-methoxyethyl) ribonucleotide
  misc_feature 6..15: note = DNA
  modified_base 16..20: mod_base = OTHER; note = 2'-O-(2-methoxyethyl) ribonucleotide
gtggttgtaattagtaggtt

SEQ ID NO: 1121 - DNA, 20 bp, synthetic construct
  source 1..20: mol_type = other DNA
  modified_base 1..20: mod_base = OTHER; note = Phosphorothioate linkage
  modified_base 1..5: mod_base = OTHER; note = 2'-O-(2-methoxyethyl) ribonucleotide
  misc_feature 6..15: note = DNA
  modified_base 16..20: mod_base = OTHER; note = 2'-O-(2-methoxyethyl) ribonucleotide
  modified_base 1: mod_base = OTHER; note = 5-methyl cytidine
  modified_base 3: mod_base = OTHER; note = 5-methyl cytidine
  modified_base 6: mod_base = OTHER; note = 5-methyl cytidine
  modified_base 12: mod_base = OTHER; note = 5-methyl cytidine
  modified_base 20: mod_base = OTHER; note = 5-methyl cytidine
cacggctttgacgattagac

SEQ ID NO: 1122 - DNA, 20 bp, synthetic construct
  source 1..20: mol_type = other DNA
  modified_base 1..20: mod_base = OTHER; note = Phosphorothioate linkage
  modified_base 1..5: mod_base = OTHER; note = 2'-O-(2-methoxyethyl) ribonucleotide
  misc_feature 6..15: note = DNA
  modified_base 16..20: mod_base = OTHER; note = 2'-O-(2-methoxyethyl) ribonucleotide
  modified_base 1..2: mod_base = OTHER; note = 5-methyl cytidine
  modified_base 10..12: mod_base = OTHER; note = 5-methyl cytidine
  modified_base 16..17: mod_base = OTHER; note = 5-methyl cytidine
  modified_base 20: mod_base = OTHER; note = 5-methyl cytidine
cctaaatgtccctggccggc

SEQ ID NO: 1123 - DNA, 20 bp, synthetic construct
  source 1..20: mol_type = other DNA
  modified_base 1..20: mod_base = OTHER; note = Phosphorothioate linkage
  modified_base 1..5: mod_base = OTHER; note = 2'-O-(2-methoxyethyl) ribonucleotide
  misc_feature 6..15: note = DNA
  modified_base 16..20: mod_base = OTHER; note = 2'-O-(2-methoxyethyl) ribonucleotide
  modified_base 3..5: mod_base = OTHER; note = 5-methyl cytidine
  modified_base 7..8: mod_base = OTHER; note = 5-methyl cytidine
  modified_base 10..12: mod_base = OTHER; note = 5-methyl cytidine
gtccctccaccctgagttgt

SEQ ID NO: 1124 - DNA, 20 bp, synthetic construct
  source 1..20: mol_type = other DNA
  modified_base 1..20: mod_base = OTHER; note = Phosphorothioate linkage
  modified_base 1..5: mod_base = OTHER; note = 2'-O-(2-methoxyethyl) ribonucleotide
  misc_feature 6..15: note = DNA
  modified_base 16..20: mod_base = OTHER; note = 2'-O-(2-methoxyethyl) ribonucleotide
  modified_base 4: mod_base = OTHER; note = 5-methyl cytidine
  modified_base 12: mod_base = OTHER; note = 5-methyl cytidine
gttctgtgtgtcgtgtgatg

SEQ ID NO: 1125 - DNA, 20 bp, synthetic construct
  source 1..20: mol_type = other DNA
  modified_base 1..20: mod_base = OTHER; note = Phosphorothioate linkage
  modified_base 1..5: mod_base = OTHER; note = 2'-O-(2-methoxyethyl) ribonucleotide
  misc_feature 6..15: note = DNA
  modified_base 16..20: mod_base = OTHER; note = 2'-O-(2-methoxyethyl) ribonucleotide
  modified_base 5: mod_base = OTHER; note = 5-methyl cytidine
  modified_base 7: mod_base = OTHER; note = 5-methyl cytidine
  modified_base 10: mod_base = OTHER; note = 5-methyl cytidine
  modified_base 12: mod_base = OTHER; note = 5-methyl cytidine
  modified_base 19..20: mod_base = OTHER; note = 5-methyl cytidine
gagtctcagcactattgacc

SEQ ID NO: 1126 - DNA, 20 bp, synthetic construct
  source 1..20: mol_type = other DNA
  modified_base 1..20: mod_base = OTHER; note = Phosphorothioate linkage
  modified_base 1..5: mod_base = OTHER; note = 2'-O-(2-methoxyethyl) ribonucleotide
  misc_feature 6..15: note = DNA
  modified_base 16..20: mod_base = OTHER; note = 2'-O-(2-methoxyethyl) ribonucleotide
  modified_base 1: mod_base = OTHER; note = 5-methyl cytidine
  modified_base 7: mod_base = OTHER; note = 5-methyl cytidine
  modified_base 12: mod_base = OTHER; note = 5-methyl cytidine
  modified_base 14..15: mod_base = OTHER; note = 5-methyl cytidine
  modified_base 19..20: mod_base = OTHER; note = 5-methyl cytidine
cgttatcgtggcaccttacc

SEQ ID NO: 1127 - DNA, 20 bp, synthetic construct
  source 1..20: mol_type = other DNA
  modified_base 1..20: mod_base = OTHER; note = Phosphorothioate linkage
  modified_base 1..5: mod_base = OTHER; note = 2'-O-(2-methoxyethyl) ribonucleotide
  misc_feature 6..15: note = DNA
  modified_base 16..20: mod_base = OTHER; note = 2'-O-(2-methoxyethyl) ribonucleotide
  modified_base 5: mod_base = OTHER; note = 5-methyl cytidine
  modified_base 8: mod_base = OTHER; note = 5-methyl cytidine
  modified_base 13: mod_base = OTHER; note = 5-methyl cytidine
  modified_base 15: mod_base = OTHER; note = 5-methyl cytidine
  modified_base 17: mod_base = OTHER; note = 5-methyl cytidine
gatgctgcataactctctta

SEQ ID NO: 1128 - DNA, 20 bp, synthetic construct
  source 1..20: mol_type = other DNA
  modified_base 1..20: mod_base = OTHER; note = Phosphorothioate linkage
  modified_base 1..5: mod_base = OTHER; note = 2'-O-(2-methoxyethyl) ribonucleotide
  misc_feature 6..15: note = DNA
  modified_base 16..20: mod_base = OTHER; note = 2'-O-(2-methoxyethyl) ribonucleotide
  modified_base 4: mod_base = OTHER; note = 5-methyl cytidine
  modified_base 11: mod_base = OTHER; note = 5-methyl cytidine
  modified_base 14..15: mod_base = OTHER; note = 5-methyl cytidine
  modified_base 18: mod_base = OTHER; note = 5-methyl cytidine
ggacataaggctgccttctg

SEQ ID NO: 1129 - DNA, 20 bp, synthetic construct
  source 1..20: mol_type = other DNA
  modified_base 1..20: mod_base = OTHER; note = Phosphorothioate linkage
  modified_base 1..5: mod_base = OTHER; note = 2'-O-(2-methoxyethyl) ribonucleotide
  misc_feature 6..15: note = DNA
  modified_base 16..20: mod_base = OTHER; note = 2'-O-(2-methoxyethyl) ribonucleotide
  modified_base 16: mod_base = OTHER; note = 5-methyl cytidine
  modified_base 18: mod_base = OTHER; note = 5-methyl cytidine
gttagggagggtgactgcta

SEQ ID NO: 1130 - RNA, 20 nt, synthetic construct
  source 1..20: mol_type = other RNA
  modified_base 1..20: mod_base = OTHER; note = Phosphorothioate linkage
  modified_base 1..20: mod_base = OTHER; note = 2'-O-(2-methoxyethyl) ribonucleotide
  modified_base 1..4: mod_base = OTHER; note = 5-methyl cytidine
  modified_base 9: mod_base = OTHER; note = 5-methyl cytidine
  modified_base 11: mod_base = OTHER; note = 5-methyl cytidine
  modified_base 13: mod_base = OTHER; note = 5-methyl cytidine
ccccttggcactcggagttg

SEQ ID NO: 1131 - RNA, 20 nt, synthetic construct
  source 1..20: mol_type = other RNA
  modified_base 1..20: mod_base = OTHER; note = Phosphorothioate linkage
  modified_base 1..20: mod_base = OTHER; note = 2'-O-(2-methoxyethyl) ribonucleotide
  modified_base 2: mod_base = OTHER; note = 5-methyl cytidine
  modified_base 5: mod_base = OTHER; note = 5-methyl cytidine
  modified_base 14: mod_base = OTHER; note = 5-methyl cytidine
  modified_base 16..19: mod_base = OTHER; note = 5-methyl cytidine
gcagctaggttggctcccct

SEQ ID NO: 1132 - RNA, 20 nt, synthetic construct
  source 1..20: mol_type = other RNA
  modified_base 1..20: mod_base = OTHER; note = Phosphorothioate linkage
  modified_base 1..20: mod_base = OTHER; note = 2'-O-(2-methoxyethyl) ribonucleotide
  modified_base 4: mod_base = OTHER; note = 5-methyl cytidine
  modified_base 13: mod_base = OTHER; note = 5-methyl cytidine
  modified_base 17: mod_base = OTHER; note = 5-methyl cytidine
ttgcgggtgggacgagctag

SEQ ID NO: 1133 - RNA, 20 nt, synthetic construct
  source 1..20: mol_type = other RNA
  modified_base 1..20: mod_base = OTHER; note = Phosphorothioate linkage
  modified_base 1..20: mod_base = OTHER; note = 2'-O-(2-methoxyethyl) ribonucleotide
  modified_base 6: mod_base = OTHER; note = 5-methyl cytidine
  modified_base 11..12: mod_base = OTHER; note = 5-methyl cytidine
  modified_base 17: mod_base = OTHER; note = 5-methyl cytidine
ggtgactgaacctggtctgg

SEQ ID NO: 1134 - RNA, 20 nt, synthetic construct
  source 1..20: mol_type = other RNA
  modified_base 1..20: mod_base = OTHER; note = Phosphorothioate linkage
  modified_base 1..20: mod_base = OTHER; note = 2'-O-(2-methoxyethyl) ribonucleotide
  modified_base 1: mod_base = OTHER; note = 5-methyl cytidine
  modified_base 16: mod_base = OTHER; note = 5-methyl cytidine
cgaaggtagtagggacttgg

SEQ ID NO: 1135 - RNA, 20 nt, synthetic construct
  source 1..20: mol_type = other RNA
  modified_base 1..20: mod_base = OTHER; note = Phosphorothioate linkage
  modified_base 2: mod_base = OTHER; note = 5-methyl cytidine
  modified_base 7..8: mod_base = OTHER; note = 5-methyl cytidine
  modified_base 14..15: mod_base = OTHER; note = 5-methyl cytidine
  modified_base 20: mod_base = OTHER; note = 5-methyl cytidine
acgagacctgagaccttggc

SEQ ID NO: 1136 - RNA, 20 nt, synthetic construct
  source 1..20: mol_type = other RNA
  modified_base 1..20: mod_base = OTHER; note = Phosphorothioate linkage
  modified_base 7: mod_base = OTHER; note = 5-methyl cytidine
  modified_base 11: mod_base = OTHER; note = 5-methyl cytidine
  modified_base 14: mod_base = OTHER; note = 5-methyl cytidine
  modified_base 17..20: mod_base = OTHER; note = 5-methyl cytidine
taggtgctggcttcttcccc

SEQ ID NO: 1137 - RNA, 20 nt, synthetic construct
  source 1..20: mol_type = other RNA
  modified_base 1..20: mod_base = OTHER; note = Phosphorothioate linkage
  modified_base 2..3: mod_base = OTHER; note = 5-methyl cytidine
  modified_base 7: mod_base = OTHER; note = 5-methyl cytidine
  modified_base 12..14: mod_base = OTHER; note = 5-methyl cytidine
  modified_base 17: mod_base = OTHER; note = 5-methyl cytidine
  modified_base 19..20: mod_base = OTHER; note = 5-methyl cytidine
accattcttgacccagctcc

SEQ ID NO: 1138 - RNA, 20 nt, synthetic construct
  source 1..20: mol_type = other RNA
  modified_base 1..20: mod_base = OTHER; note = Phosphorothioate linkage
  modified_base 2: mod_base = OTHER; note = 5-methyl cytidine
  modified_base 8: mod_base = OTHER; note = 5-methyl cytidine
  modified_base 10..13: mod_base = OTHER; note = 5-methyl cytidine
gcagtgacgccccgttagaa

SEQ ID NO: 1139 - RNA, 20 nt, synthetic construct
  source 1..20: mol_type = other RNA
  modified_base 1..20: mod_base = OTHER; note = Phosphorothioate linkage
  modified_base 5: mod_base = OTHER; note = 5-methyl cytidine
  modified_base 8: mod_base = OTHER; note = 5-methyl cytidine
  modified_base 16..17: mod_base = OTHER; note = 5-methyl cytidine
  modified_base 19: mod_base = OTHER; note = 5-methyl cytidine
gagacaacagaagaaccgct

SEQ ID NO: 1140 - RNA, 20 nt, synthetic construct
  source 1..20: mol_type = other RNA
  modified_base 1..20: mod_base = OTHER; note = Phosphorothioate linkage
  modified_base 2..3: mod_base = OTHER; note = 5-methyl cytidine
  modified_base 11: mod_base = OTHER; note = 5-methyl cytidine
  modified_base 20: mod_base = OTHER; note = 5-methyl cytidine
gccatgtgagcttgaggttc

SEQ ID NO: 1141 - RNA, 20 nt, synthetic construct
  source 1..20: mol_type = other RNA
  modified_base 1..20: mod_base = OTHER; note = Phosphorothioate linkage
  modified_base 6: mod_base = OTHER; note = 5-methyl cytidine
  modified_base 10: mod_base = OTHER; note = 5-methyl cytidine
  modified_base 12: mod_base = OTHER; note = 5-methyl cytidine
ggagtcggacgcaggtagga

SEQ ID NO: 1142 - RNA, 20 nt, synthetic construct
  source 1..20: mol_type = other RNA
  modified_base 1..20: mod_base = OTHER; note = Phosphorothioate linkage
  modified_base 5: mod_base = OTHER; note = 5-methyl cytidine
  modified_base 12: mod_base = OTHER; note = 5-methyl cytidine
  modified_base 17: mod_base = OTHER; note = 5-methyl cytidine
  modified_base 19: mod_base = OTHER; note = 5-methyl cytidine
gggtctgtagtctgagcgct

SEQ ID NO: 1143 - RNA, 20 nt, synthetic construct
  source 1..20: mol_type = other RNA
  modified_base 1..20: mod_base = OTHER; note = Phosphorothioate linkage
  modified_base 7: mod_base = OTHER; note = 5-methyl cytidine
  modified_base 17: mod_base = OTHER; note = 5-methyl cytidine
tggaaactgaggtaggcggg

SEQ ID NO: 1144 - RNA, 20 nt, synthetic construct
  source 1..20: mol_type = other RNA
  modified_base 1..20: mod_base = OTHER; note = Phosphorothioate linkage
  modified_base 2..3: mod_base = OTHER; note = 5-methyl cytidine
  modified_base 12: mod_base = OTHER; note = 5-methyl cytidine
  modified_base 20: mod_base = OTHER; note = 5-methyl cytidine
agccaatgggagcgggtagc

SEQ ID NO: 1145 - RNA, 20 nt, synthetic construct
  source 1..20: mol_type = other RNA
  modified_base 1..20: mod_base = OTHER; note = Phosphorothioate linkage
  modified_base 3: mod_base = OTHER; note = 5-methyl cytidine
  modified_base 7..10: mod_base = OTHER; note = 5-methyl cytidine
  modified_base 12..13: mod_base = OTHER; note = 5-methyl cytidine
  modified_base 15: mod_base = OTHER; note = 5-methyl cytidine
ggctggccccacctctatat

SEQ ID NO: 1146 - RNA, 20 nt, synthetic construct
  source 1..20: mol_type = other RNA
  modified_base 1..20: mod_base = OTHER; note = Phosphorothioate linkage
aggagagtgatttgagtaga

SEQ ID NO: 1147 - RNA, 20 nt, synthetic construct
  source 1..20: mol_type = other RNA
  modified_base 1..20: mod_base = OTHER; note = Phosphorothioate linkage
  modified_base 2: mod_base = OTHER; note = 5-methyl cytidine
  modified_base 6..8: mod_base = OTHER; note = 5-methyl cytidine
  modified_base 11: mod_base = OTHER; note = 5-methyl cytidine
  modified_base 14: mod_base = OTHER; note = 5-methyl cytidine
  modified_base 16: mod_base = OTHER; note = 5-methyl cytidine
gctgtcccgacgtcacatga

SEQ ID NO: 1148 - RNA, 20 nt, synthetic construct
  source 1..20: mol_type = other RNA
  modified_base 1..20: mod_base = OTHER; note = Phosphorothioate linkage
  modified_base 14: mod_base = OTHER; note = 5-methyl cytidine
  modified_base 17: mod_base = OTHER; note = 5-methyl cytidine
gggttaaggaaggcgacgag

SEQ ID NO: 1149 - RNA, 20 nt, synthetic construct
  source 1..20: mol_type = other RNA
  modified_base 1..20: mod_base = OTHER; note = Phosphorothioate linkage
  modified_base 4: mod_base = OTHER; note = 5-methyl cytidine
  modified_base 8: mod_base = OTHER; note = 5-methyl cytidine
  modified_base 10..14: mod_base = OTHER; note = 5-methyl cytidine
  modified_base 18: mod_base = OTHER; note = 5-methyl cytidine
  modified_base 20: mod_base = OTHER; note = 5-methyl cytidine
tagcaaactcccccaggcgc

SEQ ID NO: 1150 - RNA, 20 nt, synthetic construct
  source 1..20: mol_type = other RNA
  modified_base 1..20: mod_base = OTHER; note = Phosphorothioate linkage
  modified_base 2..5: mod_base = OTHER; note = 5-methyl cytidine
  modified_base 9: mod_base = OTHER; note = 5-methyl cytidine
  modified_base 11: mod_base = OTHER; note = 5-methyl cytidine
  modified_base 13: mod_base = OTHER; note = 5-methyl cytidine
  modified_base 15: mod_base = OTHER; note = 5-methyl cytidine
  modified_base 17: mod_base = OTHER; note = 5-methyl cytidine
gccccagacacgcgctatca

SEQ ID NO: 1151 - RNA, 20 nt, synthetic construct
  source 1..20: mol_type = other RNA
  modified_base 1..20: mod_base = OTHER; note = Phosphorothioate linkage
  modified_base 3: mod_base = OTHER; note = 5-methyl cytidine
  modified_base 19: mod_base = OTHER; note = 5-methyl cytidine
ggcaggataggataggagcg

SEQ ID NO: 1152 - RNA, 20 nt, synthetic construct
  source 1..20: mol_type = other RNA
  modified_base 1..20: mod_base = OTHER; note = Phosphorothioate linkage
  modified_base 3..4: mod_base = OTHER; note = 5-methyl cytidine
  modified_base 8: mod_base = OTHER; note = 5-methyl cytidine
  modified_base 13: mod_base = OTHER; note = 5-methyl cytidine
  modified_base 16..17: mod_base = OTHER; note = 5-methyl cytidine
tgcctagcatgtcaaccgag

SEQ ID NO: 1153 - RNA, 20 nt, synthetic construct
  source 1..20: mol_type = other RNA
  modified_base 1..20: mod_base = OTHER; note = Phosphorothioate linkage
  modified_base 1: mod_base = OTHER; note = 5-methyl cytidine
  modified_base 4..5: mod_base = OTHER; note = 5-methyl cytidine
  modified_base 8: mod_base = OTHER; note = 5-methyl cytidine
  modified_base 11: mod_base = OTHER; note = 5-methyl cytidine
  modified_base 13: mod_base = OTHER; note = 5-methyl cytidine
  modified_base 15: mod_base = OTHER; note = 5-methyl cytidine
  modified_base 17: mod_base = OTHER; note = 5-methyl cytidine
catccttcaactcactctgg

SEQ ID NO: 1154 - RNA, 20 nt, synthetic construct
  source 1..20: mol_type = other RNA
  modified_base 1..20: mod_base = OTHER; note = Phosphorothioate linkage
  modified_base 3: mod_base = OTHER; note = 5-methyl cytidine
  modified_base 11: mod_base = OTHER; note = 5-methyl cytidine
  modified_base 17..18: mod_base = OTHER; note = 5-methyl cytidine
ggctgtttatctttgtcctg

SEQ ID NO: 1155 - RNA, 20 nt, synthetic construct
  source 1..20: mol_type = other RNA
  modified_base 1..20: mod_base = OTHER; note = Phosphorothioate linkage
  modified_base 4..5: mod_base = OTHER; note = 5-methyl cytidine
  modified_base 8: mod_base = OTHER; note = 5-methyl cytidine
  modified_base 13: mod_base = OTHER; note = 5-methyl cytidine
  modified_base 15..16: mod_base = OTHER; note = 5-methyl cytidine
tgtcctgctgagcaccttga

SEQ ID NO: 1156 - RNA, 20 nt, synthetic construct
  source 1..20: mol_type = other RNA
  modified_base 1..20: mod_base = OTHER; note = Phosphorothioate linkage
  modified_base 5: mod_base = OTHER; note = 5-methyl cytidine
  modified_base 8..9: mod_base = OTHER; note = 5-methyl cytidine
  modified_base 15: mod_base = OTHER; note = 5-methyl cytidine
  modified_base 19: mod_base = OTHER; note = 5-methyl cytidine
gattcagcctgagactgtct

SEQ ID NO: 1157 - RNA, 20 nt, synthetic construct
  source 1..20: mol_type = other RNA
  modified_base 1..20: mod_base = OTHER; note = Phosphorothioate linkage
  modified_base 2: mod_base = OTHER; note = 5-methyl cytidine
  modified_base 5: mod_base = OTHER; note = 5-methyl cytidine
  modified_base 9: mod_base = OTHER; note = 5-methyl cytidine
  modified_base 11: mod_base = OTHER; note = 5-methyl cytidine
  modified_base 13: mod_base = OTHER; note = 5-methyl cytidine
  modified_base 16..17: mod_base = OTHER; note = 5-methyl cytidine
gcaactggcgcacaaccttg

SEQ ID NO: 1158 - RNA, 20 nt, synthetic construct
  source 1..20: mol_type = other RNA
  modified_base 1..20: mod_base = OTHER; note = Phosphorothioate linkage
  modified_base 3: mod_base = OTHER; note = 5-methyl cytidine
  modified_base 7: mod_base = OTHER; note = 5-methyl cytidine
  modified_base 10: mod_base = OTHER; note = 5-methyl cytidine
  modified_base 13..14: mod_base = OTHER; note = 5-methyl cytidine
  modified_base 16: mod_base = OTHER; note = 5-methyl cytidine
  modified_base 18..20: mod_base = OTHER; note = 5-methyl cytidine
gacaatctacttcctctccc

SEQ ID NO: 1159 - RNA, 20 nt, synthetic construct
  source 1..20: mol_type = other RNA
  modified_base 1..20: mod_base = OTHER; note = Phosphorothioate linkage
  modified_base 4: mod_base = OTHER; note = 5-methyl cytidine
  modified_base 7..9: mod_base = OTHER; note = 5-methyl cytidine
  modified_base 13: mod_base = OTHER; note = 5-methyl cytidine
  modified_base 15: mod_base = OTHER; note = 5-methyl cytidine
  modified_base 18: mod_base = OTHER; note = 5-methyl cytidine
  modified_base 20: mod_base = OTHER; note = 5-methyl cytidine
aatcttcccagactcagctc

SEQ ID NO: 1160 - RNA, 20 nt, synthetic construct
  source 1..20: mol_type = other RNA
  modified_base 1..20: mod_base = OTHER; note = Phosphorothioate linkage
  modified_base 2: mod_base = OTHER; note = 5-methyl cytidine
  modified_base 4: mod_base = OTHER; note = 5-methyl cytidine
  modified_base 7..9: mod_base = OTHER; note = 5-methyl cytidine
  modified_base 12: mod_base = OTHER; note = 5-methyl cytidine
  modified_base 14..15: mod_base = OTHER; note = 5-methyl cytidine
  modified_base 17..18: mod_base = OTHER; note = 5-methyl cytidine
  modified_base 20: mod_base = OTHER; note = 5-methyl cytidine
gctcttcccaacacctcctc

SEQ ID NO: 1161 - RNA, 20 nt, synthetic construct
  source 1..20: mol_type = other RNA
  modified_base 1..20: mod_base = OTHER; note = Phosphorothioate linkage
  modified_base 2..3: mod_base = OTHER; note = 5-methyl cytidine
  modified_base 6..8: mod_base = OTHER; note = 5-methyl cytidine
  modified_base 11..13: mod_base = OTHER; note = 5-methyl cytidine
  modified_base 16: mod_base = OTHER; note = 5-methyl cytidine
gcctgcccttcccatctggt

SEQ ID NO: 1162 - RNA, 20 nt, synthetic construct
  source 1..20: mol_type = other RNA
  modified_base 1..20: mod_base = OTHER; note = Phosphorothioate linkage
  modified_base 6: mod_base = OTHER; note = 5-methyl cytidine
  modified_base 14..15: mod_base = OTHER; note = 5-methyl cytidine
  modified_base 17: mod_base = OTHER; note = 5-methyl cytidine
  modified_base 20: mod_base = OTHER; note = 5-methyl cytidine
ggagactaggaagccacttc

SEQ ID NO: 1163 - RNA, 20 nt, synthetic construct
  source 1..20: mol_type = other RNA
  modified_base 1..20: mod_base = OTHER; note = Phosphorothioate linkage
  modified_base 5: mod_base = OTHER; note = 5-methyl cytidine
  modified_base 10..11: mod_base = OTHER; note = 5-methyl cytidine
  modified_base 13: mod_base = OTHER; note = 5-methyl cytidine
  modified_base 19: mod_base = OTHER; note = 5-methyl cytidine
atatcaattcctcgaaggca

SEQ ID NO: 1164 - RNA, 20 nt, synthetic construct
  source 1..20: mol_type = other RNA
  modified_base 1..20: mod_base = OTHER; note = Phosphorothioate linkage
  modified_base 3: mod_base = OTHER; note = 5-methyl cytidine
  modified_base 8: mod_base = OTHER; note = 5-methyl cytidine
  modified_base 13: mod_base = OTHER; note = 5-methyl cytidine
ggctaatctgttctgtggta

SEQ ID NO: 1165 - RNA, 20 nt, synthetic construct
  source 1..20: mol_type = other RNA
  modified_base 1..20: mod_base = OTHER; note = Phosphorothioate linkage
  modified_base 1: mod_base = OTHER; note = 5-methyl cytidine
  modified_base 5..7: mod_base = OTHER; note = 5-methyl cytidine
  modified_base 10: mod_base = OTHER; note = 5-methyl cytidine
  modified_base 12..14: mod_base = OTHER; note = 5-methyl cytidine
  modified_base 17: mod_base = OTHER; note = 5-methyl cytidine
  modified_base 20: mod_base = OTHER; note = 5-methyl cytidine
ctggcccatctcccatcatc

SEQ ID NO: 1166 - RNA, 20 nt, synthetic construct
  source 1..20: mol_type = other RNA
  modified_base 1..20: mod_base = OTHER; note = Phosphorothioate linkage
  modified_base 4..5: mod_base = OTHER; note = 5-methyl cytidine
  modified_base 7..8: mod_base = OTHER; note = 5-methyl cytidine
  modified_base 10: mod_base = OTHER; note = 5-methyl cytidine
  modified_base 13..15: mod_base = OTHER; note = 5-methyl cytidine
gttcctccacggcccagtat

SEQ ID NO: 1167 - RNA, 20 nt, synthetic construct
  source 1..20: mol_type = other RNA
  modified_base 1..20: mod_base = OTHER; note = Phosphorothioate linkage
  modified_base 2: mod_base = OTHER; note = 5-methyl cytidine
  modified_base 5: mod_base = OTHER; note = 5-methyl cytidine
  modified_base 8: mod_base = OTHER; note = 5-methyl cytidine
  modified_base 12: mod_base = OTHER; note = 5-methyl cytidine
  modified_base 14..15: mod_base = OTHER; note = 5-methyl cytidine
  modified_base 18..20: mod_base = OTHER; note = 5-methyl cytidine
gctgcagcagtctccatccc

SEQ ID NO: 1168 - RNA, 20 nt, synthetic construct
  source 1..20: mol_type = other RNA
  modified_base 1..20: mod_base = OTHER; note = Phosphorothioate linkage
  modified_base 1..20: mod_base = OTHER; note = 2'-O-(2-methoxyethyl) ribonucleotide
  modified_base 3..4: mod_base = OTHER; note = 5-methyl cytidine
  modified_base 6: mod_base = OTHER; note = 5-methyl cytidine
  modified_base 9: mod_base = OTHER; note = 5-methyl cytidine
  modified_base 11..12: mod_base = OTHER; note = 5-methyl cytidine
  modified_base 17..18: mod_base = OTHER; note = 5-methyl cytidine
atcctcagctccagttcctt

SEQ ID NO: 1169 - RNA, 20 nt, synthetic construct
  source 1..20: mol_type = other RNA
  modified_base 1..20: mod_base = OTHER; note = Phosphorothioate linkage
  modified_base 1..20: mod_base = OTHER; note = 2'-O-(2-methoxyethyl) ribonucleotide
  modified_base 1: mod_base = OTHER; note = 5-methyl cytidine
  modified_base 4: mod_base = OTHER; note = 5-methyl cytidine
  modified_base 7: mod_base = OTHER; note = 5-methyl cytidine
  modified_base 10: mod_base = OTHER; note = 5-methyl cytidine
  modified_base 13..14: mod_base = OTHER; note = 5-methyl cytidine
  modified_base 16: mod_base = OTHER; note = 5-methyl cytidine
  modified_base 20: mod_base = OTHER; note = 5-methyl cytidine
cgacttctgctgcctcgagc

SEQ ID NO: 1170 - RNA, 20 nt, synthetic construct
  source 1..20: mol_type = other RNA
  modified_base 1..20: mod_base = OTHER; note = Phosphorothioate linkage
  modified_base 1..20: mod_base = OTHER; note = 2'-O-(2-methoxyethyl) ribonucleotide
  modified_base 2: mod_base = OTHER; note = 5-methyl cytidine
  modified_base 9: mod_base = OTHER; note = 5-methyl cytidine
  modified_base 11..13: mod_base = OTHER; note = 5-methyl cytidine
  modified_base 17..19: mod_base = OTHER; note = 5-methyl cytidine
tcggttggcaccctttccct

SEQ ID NO: 1171 - RNA, 20 nt, synthetic construct
  source 1..20: mol_type = other RNA
  modified_base 1..20: mod_base = OTHER; note = Phosphorothioate linkage
  modified_base 1..20: mod_base = OTHER; note = 2'-O-(2-methoxyethyl) ribonucleotide
  modified_base 2..3: mod_base = OTHER; note = 5-methyl cytidine
  modified_base 7: mod_base = OTHER; note = 5-methyl cytidine
  modified_base 14..17: mod_base = OTHER; note = 5-methyl cytidine
  modified_base 20: mod_base = OTHER; note = 5-methyl cytidine
tccaggcttagaacccctgc

SEQ ID NO: 1172 - RNA, 20 nt, synthetic construct
  source 1..20: mol_type = other RNA
  modified_base 1..20: mod_base = OTHER; note = Phosphorothioate linkage
  modified_base 1..20: mod_base = OTHER; note = 2'-O-(2-methoxyethyl) ribonucleotide
  modified_base 4: mod_base = OTHER; note = 5-methyl cytidine
  modified_base 9..10: mod_base = OTHER; note = 5-methyl cytidine
  modified_base 12: mod_base = OTHER; note = 5-methyl cytidine
  modified_base 16: mod_base = OTHER; note = 5-methyl cytidine
tgtcttatccgctgtctggg

SEQ ID NO: 1173 - RNA, 20 nt, synthetic construct
  source 1..20: mol_type = other RNA
  modified_base 1..20: mod_base = OTHER; note = Phosphorothioate linkage
  modified_base 1..20: mod_base = OTHER; note = 2'-O-(2-methoxyethyl) ribonucleotide
  modified_base 3: mod_base = OTHER; note = 5-methyl cytidine
  modified_base 5: mod_base = OTHER; note = 5-methyl cytidine
  modified_base 9: mod_base = OTHER; note = 5-methyl cytidine
  modified_base 15: mod_base = OTHER; note = 5-methyl cytidine
ggcacagactagtactaggt

SEQ ID NO: 1174 - RNA, 20 nt, synthetic construct
  source 1..20: mol_type = other RNA
  modified_base 1..20: mod_base = OTHER; note = Phosphorothioate linkage
  modified_base 1..20: mod_base = OTHER; note = 2'-O-(2-methoxyethyl) ribonucleotide
  modified_base 1: mod_base = OTHER; note = 5-methyl cytidine
  modified_base 6: mod_base = OTHER; note = 5-methyl cytidine
  modified_base 8: mod_base = OTHER; note = 5-methyl cytidine
  modified_base 15: mod_base = OTHER; note = 5-methyl cytidine
  modified_base 17: mod_base = OTHER; note = 5-methyl cytidine
ctagtctcaagatacacagg

SEQ ID NO: 1175 - RNA, 20 nt, synthetic construct
  source 1..20: mol_type = other RNA
  modified_base 1..20: mod_base = OTHER; note = Phosphorothioate linkage
gtggttgtaattagtaggtt

SEQ ID NO: 1176 - RNA, 20 nt, synthetic construct
  source 1..20: mol_type = other RNA
  modified_base 1..20: mod_base = OTHER; note = Phosphorothioate linkage
  modified_base 1..20: mod_base = OTHER; note = 2'-O-(2-methoxyethyl) ribonucleotide
  modified_base 1: mod_base = OTHER; note = 5-methyl cytidine
  modified_base 3: mod_base = OTHER; note = 5-methyl cytidine
  modified_base 6: mod_base = OTHER; note = 5-methyl cytidine
  modified_base 12: mod_base = OTHER; note = 5-methyl cytidine
  modified_base 20: mod_base = OTHER; note = 5-methyl cytidine
cacggctttgacgattagac

SEQ ID NO: 1177 - RNA, 20 nt, synthetic construct
  source 1..20: mol_type = other RNA
  modified_base 1..20: mod_base = OTHER; note = Phosphorothioate linkage
  modified_base 1..20: mod_base = OTHER; note = 2'-O-(2-methoxyethyl) ribonucleotide
  modified_base 1..2: mod_base = OTHER; note = 5-methyl cytidine
  modified_base 10..12: mod_base = OTHER; note = 5-methyl cytidine
  modified_base 16..17: mod_base = OTHER; note = 5-methyl cytidine
  modified_base 20: mod_base = OTHER; note = 5-methyl cytidine
cctaaatgtccctggccggc

SEQ ID NO: 1178 - RNA, 20 nt, synthetic construct
  source 1..20: mol_type = other RNA
  modified_base 1..20: mod_base = OTHER; note = Phosphorothioate linkage
  modified_base 1..20: mod_base = OTHER; note = 2'-O-(2-methoxyethyl) ribonucleotide
  modified_base 3..5: mod_base = OTHER; note = 5-methyl cytidine
  modified_base 7..8: mod_base = OTHER; note = 5-methyl cytidine
  modified_base 10..12: mod_base = OTHER; note = 5-methyl cytidine
gtccctccaccctgagttgt

SEQ ID NO: 1179 - RNA, 20 nt, synthetic construct
  source 1..20: mol_type = other RNA
  modified_base 1..20: mod_base = OTHER; note = Phosphorothioate linkage
  modified_base 1..20: mod_base = OTHER; note = 2'-O-(2-methoxyethyl) ribonucleotide
  modified_base 4: mod_base = OTHER; note = 5-methyl cytidine
  modified_base 12: mod_base = OTHER; note = 5-methyl cytidine
gttctgtgtgtcgtgtgatg

SEQ ID NO: 1180 - RNA, 20 nt, synthetic construct
  source 1..20: mol_type = other RNA
  modified_base 1..20: mod_base = OTHER; note = Phosphorothioate linkage
  modified_base 1..20: mod_base = OTHER; note = 2'-O-(2-methoxyethyl) ribonucleotide
  modified_base 5: mod_base = OTHER; note = 5-methyl cytidine
  modified_base 7: mod_base = OTHER; note = 5-methyl cytidine
  modified_base 10: mod_base = OTHER; note = 5-methyl cytidine
  modified_base 12: mod_base = OTHER; note = 5-methyl cytidine
  modified_base 19..20: mod_base = OTHER; note = 5-methyl cytidine
gagtctcagcactattgacc

SEQ ID NO: 1181 - RNA, 20 nt, synthetic construct
  source 1..20: mol_type = other RNA
  modified_base 1..20: mod_base = OTHER; note = Phosphorothioate linkage
  modified_base 1..20: mod_base = OTHER; note = 2'-O-(2-methoxyethyl) ribonucleotide
  modified_base 1: mod_base = OTHER; note = 5-methyl cytidine
  modified_base 7: mod_base = OTHER; note = 5-methyl cytidine
  modified_base 12: mod_base = OTHER; note = 5-methyl cytidine
  modified_base 14..15: mod_base = OTHER; note = 5-methyl cytidine
  modified_base 19..20: mod_base = OTHER; note = 5-methyl cytidine
cgttatcgtggcaccttacc

SEQ ID NO: 1182 - RNA, 20 nt, synthetic construct
  source 1..20: mol_type = other RNA
  modified_base 1..20: mod_base = OTHER; note = Phosphorothioate linkage
  modified_base 1..20: mod_base = OTHER; note = 2'-O-(2-methoxyethyl) ribonucleotide
  modified_base 5: mod_base = OTHER; note = 5-methyl cytidine
  modified_base 8: mod_base = OTHER; note = 5-methyl cytidine
  modified_base 13: mod_base = OTHER; note = 5-methyl cytidine
  modified_base 15: mod_base = OTHER; note = 5-methyl cytidine
  modified_base 17: mod_base = OTHER; note = 5-methyl cytidine
gatgctgcataactctctta

SEQ ID NO: 1183 - RNA, 20 nt, synthetic construct
  source 1..20: mol_type = other RNA
  modified_base 1..20: mod_base = OTHER; note = Phosphorothioate linkage
  modified_base 1..20: mod_base = OTHER; note = 2'-O-(2-methoxyethyl) ribonucleotide
  modified_base 4: mod_base = OTHER; note = 5-methyl cytidine
  modified_base 11: mod_base = OTHER; note = 5-methyl cytidine
  modified_base 14..15: mod_base = OTHER; note = 5-methyl cytidine
  modified_base 18: mod_base = OTHER; note = 5-methyl cytidine
ggacataaggctgccttctg

SEQ ID NO: 1184 - RNA, 20 nt, synthetic construct
  source 1..20: mol_type = other RNA
  modified_base 1..20: mod_base = OTHER; note = Phosphorothioate linkage
  modified_base 1..20: mod_base = OTHER; note = 2'-O-(2-methoxyethyl) ribonucleotide
  modified_base 15: mod_base = OTHER; note = 5-methyl cytidine
  modified_base 18: mod_base = OTHER; note = 5-methyl cytidine
gttagggagggtgactgcta

SEQ ID NO: 1185 - RNA, 20 nt, synthetic construct
  source 1..20: mol_type = other RNA
  modified_base 1..20: mod_base = OTHER; note = Phosphorothioate linkage
  modified_base 1..5: mod_base = OTHER; note = 2'-O-(2-methoxyethyl) ribonucleotide
  modified_base 6: mod_base = OTHER; note = locked nucleic acid
  modified_base 7..8: mod_base = OTHER; note = 2'-O-(2-methoxyethyl) ribonucleotide
  modified_base 9: mod_base = OTHER; note = locked nucleic acid
  modified_base 10..11: mod_base = OTHER; note = 2'-O-(2-methoxyethyl) ribonucleotide
  modified_base 12: mod_base = OTHER; note = locked nucleic acid
  modified_base 13..14: mod_base = OTHER; note = 2'-O-(2-methoxyethyl) ribonucleotide
  modified_base 15: mod_base = OTHER; note = locked nucleic acid
  modified_base 16..20: mod_base = OTHER; note = 2'-O-(2-methoxyethyl) ribonucleotide
  modified_base 4: mod_base = OTHER; note = 5-methyl cytidine
  modified_base 18: mod_base = OTHER; note = 5-methyl cytidine
ggacttgggagtggtgactg

SEQ ID NO: 1186 - RNA, 19 nt, synthetic construct
  source 1..19: mol_type = other RNA
  modified_base 1..19: mod_base = OTHER; note = Phosphorothioate linkage
  modified_base 1..19: mod_base = OTHER; note = 2'-O-(2-methoxyethyl) ribonucleotide
  modified_base 3: mod_base = OTHER; note = 5-methyl cytidine
  modified_base 17: mod_base = OTHER; note = 5-methyl cytidine
gacttgggagtggtgactg

SEQ ID NO: 1187 - RNA, 18 nt, synthetic construct
  source 1..18: mol_type = other RNA
  modified_base 1..18: mod_base = OTHER; note = Phosphorothioate linkage
  modified_base 1..18: mod_base = OTHER; note = 2'-O-(2-methoxyethyl) ribonucleotide
  modified_base 3: mod_base = OTHER; note = 5-methyl cytidine
  modified_base 17: mod_base = OTHER; note = 5-methyl cytidine
gacttgggagtggtgact

SEQ ID NO: 1188 - RNA, 19 nt, synthetic construct
  source 1..19: mol_type = other RNA
  modified_base 1..19: mod_base = OTHER; note = Phosphorothioate linkage
  modified_base 1..4: mod_base = OTHER; note = 2'-O-(2-methoxyethyl) ribonucleotide
  modified_base 5: mod_base = OTHER; note = locked nucleic acid
  modified_base 6..9: mod_base = OTHER; note = 2'-O-(2-methoxyethyl) ribonucleotide
  modified_base 10: mod_base = OTHER; note = locked nucleic acid
  modified_base 11..14: mod_base = OTHER; note = 2'-O-(2-methoxyethyl) ribonucleotide
  modified_base 15: mod_base = OTHER; note = locked nucleic acid
  modified_base 16..19: mod_base = OTHER; note = 2'-O-(2-methoxyethyl) ribonucleotide
  modified_base 3: mod_base = OTHER; note = 5-methyl cytidine
  modified_base 17: mod_base = OTHER; note = 5-methyl cytidine
gacttgggagtggtgactg

SEQ ID NO: 1189 - RNA, 24 nt, synthetic construct
  source 1..24: mol_type = other RNA
  modified_base 1..24: mod_base = OTHER; note = Phosphorothioate linkage
  modified_base 1..5: mod_base = OTHER; note = 2'-O-(2-methoxyethyl) ribonucleotide
  modified_base 6: mod_base = OTHER; note = locked nucleic acid
  modified_base 7..10: mod_base = OTHER; note = 2'-O-(2-methoxyethyl) ribonucleotide
  modified_base 11: mod_base = OTHER; note = locked nucleic acid
  modified_base 12..15: mod_base = OTHER; note = 2'-O-(2-methoxyethyl) ribonucleotide
  modified_base 16: mod_base = OTHER; note = locked nucleic acid
  modified_base 17..24: mod_base = OTHER; note = 2'-O-(2-methoxyethyl) ribonucleotide
  modified_base 4: mod_base = OTHER; note = 5-methyl cytidine
  modified_base 18: mod_base = OTHER; note = 5-methyl cytidine
  modified_base 23..24: mod_base = OTHER; note = 5-methyl cytidine
ggacttgggagtggtgactgaacc

SEQ ID NO: 1190 - RNA, 25 nt, synthetic construct
  source 1..25: mol_type = other RNA
  modified_base 1..25: mod_base = OTHER; note = Phosphorothioate linkage
  modified_base 1..25: mod_base = OTHER; note = 2'-O-(2-methoxyethyl) ribonucleotide
  modified_base 4: mod_base = OTHER; note = 5-methyl cytidine
  modified_base 17: mod_base = OTHER; note = 5-methyl cytidine
  modified_base 22..23: mod_base = OTHER; note = 5-methyl cytidine
ggacttgggagtggtgactgaacct

SEQ ID NO: 1191 - RNA, 25 nt, synthetic construct
  source 1..25: mol_type = other RNA
  modified_base 1..25: mod_base = OTHER; note = Phosphorothioate linkage
  modified_base 1..5: mod_base = OTHER; note = 2'-O-(2-methoxyethyl) ribonucleotide
  modified_base 6: mod_base = OTHER; note = locked nucleic acid
  modified_base 7..10: mod_base = OTHER; note = 2'-O-(2-methoxyethyl) ribonucleotide
  modified_base 11: mod_base = OTHER; note = locked nucleic acid
  modified_base 12..15: mod_base = OTHER; note = 2'-O-(2-methoxyethyl) ribonucleotide
  modified_base 16: mod_base = OTHER; note = locked nucleic acid
  modified_base 17..25: mod_base = OTHER; note = 2'-O-(2-methoxyethyl) ribonucleotide
  modified_base 4: mod_base = OTHER; note = 5-methyl cytidine
  modified_base 18: mod_base = OTHER; note = 5-methyl cytidine
  modified_base 23..24: mod_base = OTHER; note = 5-methyl cytidine
ggacttgggagtggtgactgaacct

SEQ ID NO: 1192 - RNA, 26 nt, synthetic construct
  source 1..26: mol_type = other RNA
  modified_base 1..26: mod_base = OTHER; note = Phosphorothioate linkage
  modified_base 1..6: mod_base = OTHER; note = 2'-O-(2-methoxyethyl) ribonucleotide
  modified_base 7: mod_base = OTHER; note = locked nucleic acid
  modified_base 8..11: mod_base = OTHER; note = 2'-O-(2-methoxyethyl) ribonucleotide
  modified_base 12: mod_base = OTHER; note = locked nucleic acid
  modified_base 13..16: mod_base = OTHER; note = 2'-O-(2-methoxyethyl) ribonucleotide
  modified_base 17: mod_base = OTHER; note = locked nucleic acid
  modified_base 18..26: mod_base = OTHER; note = 2'-O-(2-methoxyethyl) ribonucleotide
  modified_base 5: mod_base = OTHER; note = 5-methyl cytidine
  modified_base 19: mod_base = OTHER; note = 5-methyl cytidine
  modified_base 24..25: mod_base = OTHER; note = 5-methyl cytidine
gggacttgggagtggtgactgaacct

SEQ ID NO: 1193 - RNA, 27 nt, synthetic construct
  source 1..27: mol_type = other RNA
  modified_base 1..27: mod_base = OTHER; note = Phosphorothioate linkage
  modified_base 1..27: mod_base = OTHER; note = 2'-O-(2-methoxyethyl) ribonucleotide
  modified_base 6: mod_base = OTHER; note = 5-methyl cytidine
  modified_base 20: mod_base = OTHER; note = 5-methyl cytidine
  modified_base 25..26: mod_base = OTHER; note = 5-methyl cytidine
agggacttgggagtggtgactgaacct

SEQ ID NO: 1194 - RNA, 27 nt, synthetic construct
  source 1..27: mol_type = other RNA
  modified_base 1..27: mod_base = OTHER; note = Phosphorothioate linkage
  modified_base 1..7: mod_base = OTHER; note = 2'-O-(2-methoxyethyl) ribonucleotide
  modified_base 8: mod_base = OTHER; note = locked nucleic acid
  modified_base 9..12: mod_base = OTHER; note = 2'-O-(2-methoxyethyl) ribonucleotide
  modified_base 13: mod_base = OTHER; note = locked nucleic acid
  modified_base 14..17: mod_base = OTHER; note = 2'-O-(2-methoxyethyl) ribonucleotide
  modified_base 18: mod_base = OTHER; note = locked nucleic acid
  modified_base 19..27: mod_base = OTHER; note = 2'-O-(2-methoxyethyl) ribonucleotide
  modified_base 6: mod_base = OTHER; note = 5-methyl cytidine
  modified_base 20: mod_base = OTHER; note = 5-methyl cytidine
  modified_base 25..26: mod_base = OTHER; note = 5-methyl cytidine
agggacttgggagtggtgactgaacct

SEQ ID NO: 1195 - RNA, 28 nt, synthetic construct
  source 1..28: mol_type = other RNA
  modified_base 1..28: mod_base = OTHER; note = Phosphorothioate linkage
  modified_base 1..28: mod_base = OTHER; note = 2'-O-(2-methoxyethyl) ribonucleotide
  modified_base 7: mod_base = OTHER; note = 5-methyl cytidine
  modified_base 21: mod_base = OTHER; note = 5-methyl cytidine
  modified_base 26..27: mod_base = OTHER; note = 5-methyl cytidine
tagggacttgggagtggtgactgaacct

SEQ ID NO: 1196 - RNA, 28 nt, synthetic construct
  source 1..28: mol_type = other RNA
  modified_base 1..28: mod_base = OTHER; note = Phosphorothioate linkage
  modified_base 1..8: mod_base = OTHER; note = 2'-O-(2-methoxyethyl) ribonucleotide
  modified_base 9: mod_base = OTHER; note = locked nucleic acid
  modified_base 10..13: mod_base = OTHER; note = 2'-O-(2-methoxyethyl) ribonucleotide
  modified_base 14: mod_base = OTHER; note = locked nucleic acid
  modified_base 15..18: mod_base = OTHER; note = 2'-O-(2-methoxyethyl) ribonucleotide
  modified_base 19: mod_base = OTHER; note = locked nucleic acid
  modified_base 20..28: mod_base = OTHER; note = 2'-O-(2-methoxyethyl) ribonucleotide
  modified_base 7: mod_base = OTHER; note = 5-methyl cytidine
  modified_base 21: mod_base = OTHER; note = 5-methyl cytidine
  modified_base 26..27: mod_base = OTHER; note = 5-methyl cytidine
tagggacttgggagtggtgactgaacct

SEQ ID NO: 1197 - RNA, 29 nt, synthetic construct
  source 1..29: mol_type = other RNA
  modified_base 1..29: mod_base = OTHER; note = Phosphorothioate linkage
  modified_base 1..29: mod_base = OTHER; note = 2'-O-(2-methoxyethyl) ribonucleotide
  modified_base 8: mod_base = OTHER; note = 5-methyl cytidine
  modified_base 22: mod_base = OTHER; note = 5-methyl cytidine
  modified_base 27..28: mod_base = OTHER; note = 5-methyl cytidine
gtagggacttgggagtggtgactgaacct

SEQ ID NO: 1198 - RNA, 29 nt, synthetic construct
  source 1..29: mol_type = other RNA
  modified_base 1..29: mod_base = OTHER; note = Phosphorothioate linkage
  modified_base 1..9: mod_base = OTHER; note = 2'-O-(2-methoxyethyl) ribonucleotide
  modified_base 10: mod_base = OTHER; note = locked nucleic acid
  modified_base 11..14: mod_base = OTHER; note = 2'-O-(2-methoxyethyl) ribonucleotide
  modified_base 15: mod_base = OTHER; note = locked nucleic acid
  modified_base 16..19: mod_base = OTHER; note = 2'-O-(2-methoxyethyl) ribonucleotide
  modified_base 20: mod_base = OTHER; note = locked nucleic acid
  modified_base 21..29: mod_base = OTHER; note = 2'-O-(2-methoxyethyl) ribonucleotide
  modified_base 8: mod_base = OTHER; note = 5-methyl cytidine
  modified_base 22: mod_base = OTHER; note = 5-methyl cytidine
  modified_base 27..28: mod_base = OTHER; note = 5-methyl cytidine
gtagggacttgggagtggtgactgaacct

SEQ ID NO: 1199 - RNA, 30 nt, synthetic construct
  source 1..30: mol_type = other RNA
  modified_base 1..30: mod_base = OTHER; note = Phosphorothioate linkage
  modified_base 1..30: mod_base = OTHER; note = 2'-O-(2-methoxyethyl) ribonucleotide
  modified_base 9: mod_base = OTHER; note = 5-methyl cytidine
  modified_base 23: mod_base = OTHER; note = 5-methyl cytidine
  modified_base 28..29: mod_base = OTHER; note = 5-methyl cytidine
agtagggacttgggagtggtgactgaacct

SEQ ID NO: 1200 - RNA, 30 nt, synthetic construct; identical to SEQ ID NO: 1199
  source 1..30: mol_type = other RNA
  modified_base 1..30: mod_base = OTHER; note = Phosphorothioate linkage
  modified_base 1..10: mod_base = OTHER; note = 2'-O-(2-methoxyethyl) ribonucleotide
  modified_base 11: mod_base = OTHER; note = locked nucleic acid
  modified_base 12..15: mod_base = OTHER; note = 2'-O-(2-methoxyethyl) ribonucleotide
  modified_base 16: mod_base = OTHER; note = locked nucleic acid
  modified_base 17..20: mod_base = OTHER; note = 2'-O-(2-methoxyethyl) ribonucleotide
  modified_base 21: mod_base = OTHER; note = locked nucleic acid
  modified_base 22..30: mod_base = OTHER; note = 2'-O-(2-methoxyethyl) ribonucleotide
  modified_base 9: mod_base = OTHER; note = 5-methyl cytidine
  modified_base 23: mod_base = OTHER; note = 5-methyl cytidine
  modified_base 28..29: mod_base = OTHER; note = 5-methyl cytidine

SEQ ID NO: 1201 - RNA, 31 nt, synthetic construct
  source 1..31: mol_type = other RNA
  modified_base 1..31: mod_base = OTHER; note = Phosphorothioate linkage
  modified_base 1..31: mod_base = OTHER; note = 2'-O-(2-methoxyethyl) ribonucleotide
  modified_base 10: mod_base = OTHER; note = 5-methyl cytidine
  modified_base 24: mod_base = OTHER; note = 5-methyl cytidine
  modified_base 29..30: mod_base = OTHER; note = 5-methyl cytidine
tagtagggacttgggagtggtgactgaacct

SEQ ID NO: 1202 - RNA, 31 nt, synthetic construct; identical to SEQ ID NO: 1201
  source 1..31: mol_type = other RNA
  modified_base 1..31: mod_base = OTHER; note = Phosphorothioate linkage
  modified_base 1..11: mod_base = OTHER; note = 2'-O-(2-methoxyethyl) ribonucleotide
  modified_base 12: mod_base = OTHER; note = locked nucleic acid
  modified_base 13..16: mod_base = OTHER; note = 2'-O-(2-methoxyethyl) ribonucleotide
  modified_base 17: mod_base = OTHER; note = locked nucleic acid
  modified_base 18..21: mod_base = OTHER; note = 2'-O-(2-methoxyethyl) ribonucleotide
  modified_base 22: mod_base = OTHER; note = locked nucleic acid
  modified_base 23..31: mod_base = OTHER; note = 2'-O-(2-methoxyethyl) ribonucleotide
  modified_base 10: mod_base = OTHER; note = 5-methyl cytidine
  modified_base 24: mod_base = OTHER; note = 5-methyl cytidine
  modified_base 29..30: mod_base = OTHER; note = 5-methyl cytidine

SEQ ID NO: 1203 - RNA, 26 nt, synthetic construct
  source 1..26: mol_type = other RNA
  modified_base 1..26: mod_base = OTHER; note = Phosphorothioate linkage
  modified_base 1..26: mod_base = OTHER; note = 2'-O-(2-methoxyethyl) ribonucleotide
  modified_base 4: mod_base = OTHER; note = 5-methyl cytidine
  modified_base 18: mod_base = OTHER; note = 5-methyl cytidine
  modified_base 23..24: mod_base = OTHER; note = 5-methyl cytidine
ggacttgggagtggtgactgaacctg

SEQ ID NO: 1204 - RNA, 26 nt, synthetic construct
  source 1..26: mol_type = other RNA
  modified_base 1..26: mod_base = OTHER; note = Phosphorothioate linkage
  modified_base 1..5: mod_base = OTHER; note = 2'-O-(2-methoxyethyl) ribonucleotide
  modified_base 6: mod_base = OTHER; note = Locked nucleic acid
  modified_base 7..10: mod_base = OTHER; note = 2'-O-(2-methoxyethyl) ribonucleotide
  modified_base 11: mod_base = OTHER; note = Locked nucleic acid
  modified_base 12..15: mod_base = OTHER; note = 2'-O-(2-methoxyethyl) ribonucleotide
  modified_base 16: mod_base = OTHER; note = Locked nucleic acid
  modified_base 17..26: mod_base = OTHER; note = 2'-O-(2-methoxyethyl) ribonucleotide
  modified_base 4: mod_base = OTHER; note = 5-methyl cytidine
  modified_base 18: mod_base = OTHER; note = 5-methyl cytidine
  modified_base 23..24: mod_base = OTHER; note = 5-methyl cytidine
ggacttgggagtggtgactgaacctg

SEQ ID NO: 1205 - RNA, 27 nt, synthetic construct
  source 1..27: mol_type = other RNA
  modified_base 1..27: mod_base = OTHER; note = Phosphorothioate linkage
  modified_base 1..27: mod_base = OTHER; note = 2'-O-(2-methoxyethyl) ribonucleotide
  modified_base 4: mod_base = OTHER; note = 5-methyl cytidine
  modified_base 18: mod_base = OTHER; note = 5-methyl cytidine
  modified_base 23..24: mod_base = OTHER; note = 5-methyl cytidine
ggacttgggagtggtgactgaacctgg

SEQ ID NO: 1206 - RNA, 27 nt, synthetic construct
  source 1..27: mol_type = other RNA
  modified_base 1..27: mod_base = OTHER; note = Phosphorothioate linkage
  modified_base 1..5: mod_base = OTHER; note = 2'-O-(2-methoxyethyl) ribonucleotide
  modified_base 6: mod_base = OTHER; note = Locked nucleic acid
  modified_base 7..10: mod_base = OTHER; note = 2'-O-(2-methoxyethyl) ribonucleotide
  modified_base 11: mod_base = OTHER; note = Locked nucleic acid
  modified_base 12..15: mod_base = OTHER; note = 2'-O-(2-methoxyethyl) ribonucleotide
  modified_base 16: mod_base = OTHER; note = Locked nucleic acid
  modified_base 17..27: mod_base = OTHER; note = 2'-O-(2-methoxyethyl) ribonucleotide
  modified_base 4: mod_base = OTHER; note = 5-methyl cytidine
  modified_base 18: mod_base = OTHER; note = 5-methyl cytidine
  modified_base 23..24: mod_base = OTHER; note = 5-methyl cytidine
ggacttgggagtggtgactgaacctgg

SEQ ID NO: 1207 - RNA, 28 nt, synthetic construct
  source 1..28: mol_type = other RNA
  modified_base 1..28: mod_base = OTHER; note = Phosphorothioate linkage
  modified_base 1..28: mod_base = OTHER; note = 2'-O-(2-methoxyethyl) ribonucleotide
  modified_base 4: mod_base = OTHER; note = 5-methyl cytidine
  modified_base 18: mod_base = OTHER; note = 5-methyl cytidine
  modified_base 23..24: mod_base = OTHER; note = 5-methyl cytidine
ggacttgggagtggtgactgaacctggt

SEQ ID NO: 1208 - RNA, 28 nt, synthetic construct
  source 1..28: mol_type = other RNA
  modified_base 1..28: mod_base = OTHER; note = Phosphorothioate linkage
  modified_base 1..5: mod_base = OTHER; note = 2'-O-(2-methoxyethyl) ribonucleotide
  modified_base 6: mod_base = OTHER; note = Locked nucleic acid
  modified_base 7..10: mod_base = OTHER; note = 2'-O-(2-methoxyethyl) ribonucleotide
  modified_base 11: mod_base = OTHER; note = Locked nucleic acid
  modified_base 12..15: mod_base = OTHER; note = 2'-O-(2-methoxyethyl) ribonucleotide
  modified_base 16: mod_base = OTHER; note = Locked nucleic acid
  modified_base 17..28: mod_base = OTHER; note = 2'-O-(2-methoxyethyl) ribonucleotide
  modified_base 4: mod_base = OTHER; note = 5-methyl cytidine
  modified_base 18: mod_base = OTHER; note = 5-methyl cytidine
  modified_base 23..24: mod_base = OTHER; note = 5-methyl cytidine
ggacttgggagtggtgactgaacctggt

SEQ ID NO: 1209 - RNA, 29 nt, synthetic construct
  source 1..29: mol_type = other RNA
  modified_base 1..29: mod_base = OTHER; note = Phosphorothioate linkage
  modified_base 1..29: mod_base = OTHER; note = 2'-O-(2-methoxyethyl) ribonucleotide
  modified_base 4: mod_base = OTHER; note = 5-methyl cytidine
  modified_base 18: mod_base = OTHER; note = 5-methyl cytidine
  modified_base 23..24: mod_base = OTHER; note = 5-methyl cytidine
  modified_base 29: mod_base = OTHER; note = 5-methyl cytidine
ggacttgggagtggtgactgaacctggtc

SEQ ID NO: 1210 - RNA, 29 nt, synthetic construct
  source 1..29: mol_type = other RNA
  modified_base 1..29: mod_base = OTHER; note = Phosphorothioate linkage
  modified_base 1..5: mod_base = OTHER; note = 2'-O-(2-methoxyethyl) ribonucleotide
  modified_base 6: mod_base = OTHER; note = Locked nucleic acid
  modified_base 7..10: mod_base = OTHER; note = 2'-O-(2-methoxyethyl) ribonucleotide
  modified_base 11: mod_base = OTHER; note = Locked nucleic acid
  modified_base 12..15: mod_base = OTHER; note = 2'-O-(2-methoxyethyl) ribonucleotide
  modified_base 16: mod_base = OTHER; note = Locked nucleic acid
  modified_base 17..29: mod_base = OTHER; note = 2'-O-(2-methoxyethyl) ribonucleotide
  modified_base 4: mod_base = OTHER; note = 5-methyl cytidine
  modified_base 18: mod_base = OTHER; note = 5-methyl cytidine
  modified_base 23..24: mod_base = OTHER; note = 5-methyl cytidine
  modified_base 29: mod_base = OTHER; note = 5-methyl cytidine
ggacttgggagtggtgactgaacctggtc

SEQ ID NO: 1211 - RNA, 30 nt, synthetic construct
  source 1..30: mol_type = other RNA
  modified_base 1..30: mod_base = OTHER; note = Phosphorothioate linkage
  modified_base 1..30: mod_base = OTHER; note = 2'-O-(2-methoxyethyl) ribonucleotide
  modified_base 4: mod_base = OTHER; note = 5-methyl cytidine
  modified_base 18: mod_base = OTHER; note = 5-methyl cytidine
  modified_base 23..24: mod_base = OTHER; note = 5-methyl cytidine
  modified_base 29: mod_base = OTHER; note = 5-methyl cytidine
ggacttgggagtggtgactgaacctggtct

SEQ ID NO: 1212 - RNA, 30 nt, synthetic construct; identical to SEQ ID NO: 1211
  source 1..30: mol_type = other RNA
  modified_base 1..30: mod_base = OTHER; note = Phosphorothioate linkage
  modified_base 1..5: mod_base = OTHER; note = 2'-O-(2-methoxyethyl) ribonucleotide
  modified_base 6: mod_base = OTHER; note = Locked nucleic acid
  modified_base 7..10: mod_base = OTHER; note = 2'-O-(2-methoxyethyl) ribonucleotide
  modified_base 11: mod_base = OTHER; note = Locked nucleic acid
  modified_base 12..15: mod_base = OTHER; note = 2'-O-(2-methoxyethyl) ribonucleotide
  modified_base 16: mod_base = OTHER; note = Locked nucleic acid
  modified_base 17..30: mod_base = OTHER; note = 2'-O-(2-methoxyethyl) ribonucleotide
  modified_base 4: mod_base = OTHER; note = 5-methyl cytidine
  modified_base 18: mod_base = OTHER; note = 5-methyl cytidine
  modified_base 23..24: mod_base = OTHER; note = 5-methyl cytidine
  modified_base 29: mod_base = OTHER; note = 5-methyl cytidine

SEQ ID NO: 1213 - RNA, 31 nt, synthetic construct
  source 1..31: mol_type = other RNA
  modified_base 1..31: mod_base = OTHER; note = Phosphorothioate linkage
  modified_base 1..31: mod_base = OTHER; note = 2'-O-(2-methoxyethyl) ribonucleotide
  modified_base 4: mod_base = OTHER; note = 5-methyl cytidine
  modified_base 18: mod_base = OTHER; note = 5-methyl cytidine
  modified_base 23..24: mod_base = OTHER; note = 5-methyl cytidine
  modified_base 29: mod_base = OTHER; note = 5-methyl cytidine
  modified_base 31: mod_base = OTHER; note = 5-methyl cytidine
ggacttgggagtggtgactgaacctggtctc

SEQ ID NO: 1214 - RNA, 31 nt, synthetic construct; identical to SEQ ID NO: 1213
  source 1..31: mol_type = other RNA
  modified_base 1..31: mod_base = OTHER; note = Phosphorothioate linkage
  modified_base 1..5: mod_base = OTHER; note = 2'-O-(2-methoxyethyl) ribonucleotide
  modified_base 6: mod_base = OTHER; note = Locked nucleic acid
  modified_base 7..10: mod_base = OTHER; note = 2'-O-(2-methoxyethyl) ribonucleotide
  modified_base 11: mod_base = OTHER; note = Locked nucleic acid
  modified_base 12..15: mod_base = OTHER; note = 2'-O-(2-methoxyethyl) ribonucleotide
  modified_base 16: mod_base = OTHER; note = Locked nucleic acid
  modified_base 17..31: mod_base = OTHER; note = 2'-O-(2-methoxyethyl) ribonucleotide
  modified_base 4: mod_base = OTHER; note = 5-methyl cytidine
  modified_base 18: mod_base = OTHER; note = 5-methyl cytidine
  modified_base 23..24: mod_base = OTHER; note = 5-methyl cytidine
  modified_base 29: mod_base = OTHER; note = 5-methyl cytidine
  modified_base 31: mod_base = OTHER; note = 5-methyl cytidine

SEQ ID NO: 1215 - DNA, 20 bp, synthetic construct
  source 1..20: mol_type = other DNA
  modified_base 1..20: mod_base = OTHER; note = Phosphorothioate linkage
  modified_base 1..5: mod_base = OTHER; note = 2'-O-(2-methoxyethyl) ribonucleotide
  misc_feature 6..7: note = DNA
  modified_base 8: mod_base = OTHER; note = 2'-O-(2-methoxyethyl) ribonucleotide
  misc_feature 9..10: note = DNA
  modified_base 11: mod_base = OTHER; note = 2'-O-(2-methoxyethyl) ribonucleotide
  misc_feature 12..13: note = DNA
  modified_base 14: mod_base = OTHER; note = 2'-O-(2-methoxyethyl) ribonucleotide
  misc_feature 15: note = DNA
  modified_base 16..20: mod_base = OTHER; note = 2'-O-(2-methoxyethyl) ribonucleotide
  modified_base 7: mod_base = OTHER; note = 5-methyl cytidine
  modified_base 11: mod_base = OTHER; note = 5-methyl cytidine
  modified_base 14: mod_base = OTHER; note = 5-methyl cytidine
  modified_base 17..20: mod_base = OTHER; note = 5-methyl cytidine
taggtgctggcttcttcccc

SEQ ID NO: 1216 - DNA, 20 bp, synthetic construct
  source 1..20: mol_type = other DNA
  modified_base 1..20: mod_base = OTHER; note = Phosphorothioate linkage
  modified_base 1..2: mod_base = OTHER; note = 2'-O-(2-methoxyethyl) ribonucleotide
  modified_base 3: mod_base = OTHER; note = locked nucleic acid
  modified_base 4..5: mod_base = OTHER; note = 2'-O-(2-methoxyethyl) ribonucleotide
  misc_feature 6..15: note = DNA
  modified_base 16..20: mod_base = OTHER; note = 2'-O-(2-methoxyethyl) ribonucleotide
  modified_base 7: mod_base = OTHER; note = 5-methyl cytidine
  modified_base 11: mod_base = OTHER; note = 5-methyl cytidine
  modified_base 14: mod_base = OTHER; note = 5-methyl cytidine
  modified_base 17..20: mod_base = OTHER; note = 5-methyl cytidine
taggtgctggcttcttcccc

SEQ ID NO: 1217 - DNA, 20 bp, synthetic construct
  source 1..20: mol_type = other DNA
  modified_base 1..20: mod_base = OTHER; note = Phosphorothioate linkage
  modified_base 1: mod_base = OTHER; note = locked nucleic acid
  modified_base 2..5: mod_base = OTHER; note = 2'-O-(2-methoxyethyl) ribonucleotide
  misc_feature 6..15: note = DNA
  modified_base 16..19: mod_base = OTHER; note = 2'-O-(2-methoxyethyl) ribonucleotide
  modified_base 20: mod_base = OTHER; note = locked nucleic acid
  modified_base 7: mod_base = OTHER; note = 5-methyl cytidine
  modified_base 11: mod_base = OTHER; note = 5-methyl cytidine
  modified_base 14: mod_base = OTHER; note = 5-methyl cytidine
  modified_base 17..20: mod_base = OTHER; note = 5-methyl cytidine
taggtgctggcttcttcccc

SEQ ID NO: 1218 - DNA, 20 bp, synthetic construct
  source 1..20: mol_type = other DNA
  modified_base 1..20: mod_base = OTHER; note = Phosphorothioate linkage
  modified_base 1: mod_base = OTHER; note = locked nucleic acid
  modified_base 2: mod_base = OTHER; note = 2'-O-(2-methoxyethyl) ribonucleotide
  modified_base 3: mod_base = OTHER; note = locked nucleic acid
  modified_base 4..5: mod_base = OTHER; note = 2'-O-(2-methoxyethyl) ribonucleotide
  misc_feature 6..15: note = DNA
  modified_base 16..17: mod_base = OTHER; note = 2'-O-(2-methoxyethyl) ribonucleotide
  modified_base 18: mod_base = OTHER; note = locked nucleic acid
  modified_base 19: mod_base = OTHER; note = 2'-O-(2-methoxyethyl) ribonucleotide
  modified_base 20: mod_base = OTHER; note = locked nucleic acid
  modified_base 7: mod_base = OTHER; note = 5-methyl cytidine
  modified_base 11: mod_base = OTHER; note = 5-methyl cytidine
  modified_base 14: mod_base = OTHER; note = 5-methyl cytidine
  modified_base 17..20: mod_base = OTHER; note = 5-methyl cytidine
taggtgctggcttcttcccc

SEQ ID NO: 1219 - DNA, 20 bp, synthetic construct
  source 1..20: mol_type = other DNA
  modified_base 1..20: mod_base = OTHER; note = Phosphorothioate linkage
  modified_base 1..5: mod_base = OTHER; note = 2'-O-(2-methoxyethyl) ribonucleotide
  misc_feature 6..15: note = DNA
  modified_base 16..20: mod_base = OTHER; note = 2'-O-(2-methoxyethyl) ribonucleotide
  modified_base 7: mod_base = OTHER; note = 5-methyl cytidine
  modified_base 11: mod_base = OTHER; note = 5-methyl cytidine
  modified_base 14: mod_base = OTHER; note = 5-methyl cytidine
  modified_base 17..20: mod_base = OTHER; note = 5-methyl cytidine
taggtgctggcttcttcccc

SEQ ID NO: 1220 - DNA, 20 bp, synthetic construct
  source 1..20: mol_type = other DNA
  modified_base 1..20: mod_base = OTHER; note = Phosphorothioate linkage
  modified_base 1..5: mod_base = OTHER; note = 2'-O-(2-methoxyethyl) ribonucleotide
  misc_feature 6..15: note = DNA
  modified_base 16..20: mod_base = OTHER; note = 2'-O-(2-methoxyethyl) ribonucleotide
  modified_base 7: mod_base = OTHER; note = 5-methyl cytidine
  modified_base 11: mod_base = OTHER; note = 5-methyl cytidine
  modified_base 14: mod_base = OTHER; note = 5-methyl cytidine
  modified_base 17..20: mod_base = OTHER; note = 5-methyl cytidine
taggtgctggcttcttcccc

SEQ ID NO: 1221 - DNA, 20 bp, synthetic construct
  source 1..20: mol_type = other DNA
  modified_base 1..20: mod_base = OTHER; note = Phosphorothioate linkage
  modified_base 1..5: mod_base = OTHER; note = 2'-O-(2-methoxyethyl) ribonucleotide
  misc_feature 6..7: note = DNA
  modified_base 8: mod_base = OTHER; note = 2'-O-(2-methoxyethyl) ribonucleotide
  misc_feature 9..10: note = DNA
  modified_base 11: mod_base = OTHER; note = 2'-O-(2-methoxyethyl) ribonucleotide
  misc_feature 12..13: note = DNA
  modified_base 14: mod_base = OTHER; note = 2'-O-(2-methoxyethyl) ribonucleotide
  misc_feature 15: note = DNA
  modified_base 16..20: mod_base = OTHER; note = 2'-O-(2-methoxyethyl) ribonucleotide
  modified_base 2..3: mod_base = OTHER; note = 5-methyl cytidine
  modified_base 11: mod_base = OTHER; note = 5-methyl cytidine
  modified_base 20: mod_base = OTHER; note = 5-methyl cytidine
gccatgtgagcttgaggttc

SEQ ID NO: 1222 - DNA, 20 bp, synthetic construct
  source 1..20: mol_type = other DNA
  modified_base 1..20: mod_base = OTHER; note = Phosphorothioate linkage
  modified_base 1..2: mod_base = OTHER; note = 2'-O-(2-methoxyethyl) ribonucleotide
  modified_base 3: mod_base = OTHER; note = 2'-O-(2-methoxyethyl) ribonucleotide
  modified_base 4..5: mod_base = OTHER; note = 2'-O-(2-methoxyethyl) ribonucleotide
  misc_feature 6..15: note = DNA
  modified_base 16..17: mod_base = OTHER; note = 2'-O-(2-methoxyethyl) ribonucleotide
  modified_base 18: mod_base = OTHER; note = locked nucleic acid
  modified_base 19..20: mod_base = OTHER; note = 2'-O-(2-methoxyethyl) ribonucleotide
  modified_base 2..3: mod_base = OTHER; note = 5-methyl cytidine
  modified_base 11: mod_base = OTHER; note = 5-methyl cytidine
  modified_base 20: mod_base = OTHER; note = 5-methyl cytidine
gccatgtgagcttgaggttc

SEQ ID NO: 1223 - DNA, 20 bp, synthetic construct
  source 1..20: mol_type = other DNA
  modified_base 1..20: mod_base = OTHER; note = Phosphorothioate linkage
  modified_base 1: mod_base = OTHER; note = locked nucleic acid
  modified_base 2..5: mod_base = OTHER; note = 2'-O-(2-methoxyethyl) ribonucleotide
  misc_feature 6..15: note = DNA
  modified_base 16..19: mod_base = OTHER; note = 2'-O-(2-methoxyethyl) ribonucleotide
  modified_base 20: mod_base = OTHER; note = locked nucleic acid
  modified_base 2..3: mod_base = OTHER; note = 5-methyl cytidine
  modified_base 11: mod_base = OTHER; note = 5-methyl cytidine
  modified_base 20: mod_base = OTHER; note = 5-methyl cytidine
gccatgtgagcttgaggttc

SEQ ID NO: 1224 - DNA, 20 bp, synthetic construct
  source 1..20: mol_type = other DNA
  modified_base 1..20: mod_base = OTHER; note = Phosphorothioate linkage
  modified_base 1: mod_base = OTHER; note = locked nucleic acid
  modified_base 2: mod_base = OTHER; note = 2'-O-(2-methoxyethyl) ribonucleotide
  modified_base 3: mod_base = OTHER; note = locked nucleic acid
  modified_base 4..5: mod_base = OTHER; note = 2'-O-(2-methoxyethyl) ribonucleotide
  misc_feature 6..15: note = DNA
  modified_base 16..17: mod_base = OTHER; note = 2'-O-(2-methoxyethyl) ribonucleotide
  modified_base 18: mod_base = OTHER; note = locked nucleic acid
  modified_base 19: mod_base = OTHER; note = 2'-O-(2-methoxyethyl) ribonucleotide
  modified_base 20: mod_base = OTHER; note = locked nucleic acid
  modified_base 2..3: mod_base = OTHER; note = 5-methyl cytidine
  modified_base 11: mod_base = OTHER; note = 5-methyl cytidine
  modified_base 20: mod_base = OTHER; note = 5-methyl cytidine
gccatgtgagcttgaggttc

SEQ ID NO: 1225 - DNA, 20 bp, synthetic construct
  source 1..20: mol_type = other DNA
  modified_base 1..20: mod_base = OTHER; note = Phosphorothioate linkage
  modified_base 1..5: mod_base = OTHER; note = 2'-O-(2-methoxyethyl) ribonucleotide
  misc_feature 6..15: note = DNA
  modified_base 16..20: mod_base = OTHER; note = 2'-O-(2-methoxyethyl) ribonucleotide
  modified_base 2..3: mod_base = OTHER; note = 5-methyl cytidine
  modified_base 11: mod_base = OTHER; note = 5-methyl cytidine
  modified_base 20: mod_base = OTHER; note = 5-methyl cytidine
gccatgtgagcttgaggttc

SEQ ID NO: 1226 - DNA, 20 bp, synthetic construct
  source 1..20: mol_type = other DNA
  modified_base 1..20: mod_base = OTHER; note = Phosphorothioate linkage
  modified_base 1..5: mod_base = OTHER; note = 2'-O-(2-methoxyethyl) ribonucleotide
  misc_feature 6..15: note = DNA
  modified_base 16..20: mod_base = OTHER; note = 2'-O-(2-methoxyethyl) ribonucleotide
  modified_base 2..3: mod_base = OTHER; note = 5-methyl cytidine
  modified_base 11: mod_base = OTHER; note = 5-methyl cytidine
  modified_base 20: mod_base = OTHER; note = 5-methyl cytidine
gccatgtgagcttgaggttc

SEQ ID NO: 1227 - DNA, 20 bp, synthetic construct
  source 1..20: mol_type = other DNA
  modified_base 1..20: mod_base = OTHER; note = Phosphorothioate linkage
  modified_base 1..5: mod_base = OTHER; note = 2'-O-(2-methoxyethyl) ribonucleotide
  misc_feature 6..7: note = DNA
  modified_base 8: mod_base = OTHER; note = 2'-O-(2-methoxyethyl) ribonucleotide
  misc_feature 9..10: note = DNA
  modified_base 11: mod_base = OTHER; note = 2'-O-(2-methoxyethyl) ribonucleotide
  misc_feature 12..13: note = DNA
  modified_base 14: mod_base = OTHER; note = 2'-O-(2-methoxyethyl) ribonucleotide
  misc_feature 15: note = DNA
  modified_base 16..20: mod_base = OTHER; note = 2'-O-(2-methoxyethyl) ribonucleotide
  modified_base 4: mod_base = OTHER; note = 5-methyl cytidine
  modified_base 8: mod_base = OTHER; note = 5-methyl cytidine
  modified_base 10..14: mod_base = OTHER; note = 5-methyl cytidine
  modified_base 18: mod_base = OTHER; note = 5-methyl cytidine
  modified_base 20: mod_base = OTHER; note = 5-methyl cytidine
tagcaaactcccccaggcgc

SEQ ID NO: 1228 - DNA, 20 bp, synthetic construct
  source 1..20: mol_type = other DNA
  modified_base 1..20: mod_base = OTHER; note = Phosphorothioate linkage
  modified_base 1..2: mod_base = OTHER; note = 2'-O-(2-methoxyethyl) ribonucleotide
  modified_base 3: mod_base = OTHER; note = locked nucleic acid
  modified_base 4..5: mod_base = OTHER; note = 2'-O-(2-methoxyethyl) ribonucleotide
  misc_feature 6..15: note = DNA
  modified_base 16..17: mod_base = OTHER; note = 2'-O-(2-methoxyethyl) ribonucleotide
  modified_base 18: mod_base = OTHER; note = locked nucleic acid
  modified_base 19..20: mod_base = OTHER; note = 2'-O-(2-methoxyethyl) ribonucleotide
  modified_base 4: mod_base = OTHER; note = 5-methyl cytidine
  modified_base 8: mod_base = OTHER; note = 5-methyl cytidine
  modified_base 10..14: mod_base = OTHER; note = 5-methyl cytidine
  modified_base 18: mod_base = OTHER; note = 5-methyl cytidine
  modified_base 20: mod_base = OTHER; note = 5-methyl cytidine
tagcaaactcccccaggcgc

SEQ ID NO: 1229 - DNA, 20 bp, synthetic construct
  source 1..20: mol_type = other DNA
  modified_base 1..20: mod_base = OTHER; note = Phosphorothioate linkage
  modified_base 1: mod_base = OTHER; note = locked nucleic acid
  modified_base 2..5: mod_base = OTHER; note = 2'-O-(2-methoxyethyl) ribonucleotide
  misc_feature 6..15: note = DNA
  modified_base 16..19: mod_base = OTHER; note = 2'-O-(2-methoxyethyl) ribonucleotide
  modified_base 20: mod_base = OTHER; note = locked nucleic acid
  modified_base 4: mod_base = OTHER; note = 5-methyl cytidine
  modified_base 8: mod_base = OTHER; note = 5-methyl cytidine
  modified_base 10..14: mod_base = OTHER; note = 5-methyl cytidine
  modified_base 18: mod_base = OTHER; note = 5-methyl cytidine
  modified_base 20: mod_base = OTHER; note = 5-methyl cytidine
tagcaaactcccccaggcgc

SEQ ID NO: 1230 - DNA, 20 bp, synthetic construct
  source 1..20: mol_type = other DNA
  modified_base 1..20: mod_base = OTHER; note = Phosphorothioate linkage
  modified_base 1: mod_base = OTHER; note = locked nucleic acid
  modified_base 2: mod_base = OTHER; note = 2'-O-(2-methoxyethyl) ribonucleotide
  modified_base 3: mod_base = OTHER; note = locked nucleic acid
  modified_base 4..5: mod_base = OTHER; note = 2'-O-(2-methoxyethyl) ribonucleotide
  misc_feature 6..15: note = DNA
  modified_base 16..17: mod_base = OTHER; note = 2'-O-(2-methoxyethyl) ribonucleotide
  modified_base 18: mod_base = OTHER; note = locked nucleic acid
  modified_base 19: mod_base = OTHER; note = 2'-O-(2-methoxyethyl) ribonucleotide
  modified_base 20: mod_base = OTHER; note = locked nucleic acid
  modified_base 4: mod_base = OTHER; note = 5-methyl cytidine
  modified_base 8: mod_base = OTHER; note = 5-methyl cytidine
  modified_base 10..14: mod_base = OTHER; note = 5-methyl cytidine
  modified_base 18: mod_base = OTHER; note = 5-methyl cytidine
  modified_base 20: mod_base = OTHER; note = 5-methyl cytidine
tagcaaactcccccaggcgc

SEQ ID NO: 1231 - DNA, 20 bp, synthetic construct
  source 1..20: mol_type = other DNA
  modified_base 1..20: mod_base = OTHER; note = Phosphorothioate linkage
  modified_base 1..5: mod_base = OTHER; note = locked nucleic acid
  misc_feature 6..15: note = DNA
  modified_base 16..20: mod_base = OTHER; note = 2'-O-(2-methoxyethyl) ribonucleotide
  modified_base 20: mod_base = OTHER; note = locked nucleic acid
  modified_base 4: mod_base = OTHER; note = 5-methyl cytidine
  modified_base 8: mod_base = OTHER; note = 5-methyl cytidine
  modified_base 10..14: mod_base = OTHER; note = 5-methyl cytidine
  modified_base 18: mod_base = OTHER; note = 5-methyl cytidine
  modified_base 20: mod_base = OTHER; note = 5-methyl cytidine
tagcaaactcccccaggcgc

SEQ ID NO: 1232 - DNA, 20 bp, synthetic construct
  source 1..20: mol_type = other DNA
  modified_base 1..20: mod_base = OTHER; note = Phosphorothioate linkage
  modified_base 1..5: mod_base = OTHER; note = 2'-O-(2-methoxyethyl) ribonucleotide
  misc_feature 6..15: note = DNA
  modified_base 16..20: mod_base = OTHER; note = 2'-O-(2-methoxyethyl) ribonucleotide
  modified_base 4: mod_base = OTHER; note = 5-methyl cytidine
  modified_base 8: mod_base = OTHER; note = 5-methyl cytidine
  modified_base 10..14: mod_base = OTHER; note = 5-methyl cytidine
  modified_base 18: mod_base = OTHER; note = 5-methyl cytidine
  modified_base 20: mod_base = OTHER; note = 5-methyl cytidine
tagcaaactcccccaggcgc

SEQ ID NO: 1233 - DNA, 20 bp, synthetic construct
  source 1..20: mol_type = other DNA
  modified_base 1..20: mod_base = OTHER; note = Phosphorothioate linkage
  modified_base 1..5: mod_base = OTHER; note = 2'-O-(2-methoxyethyl) ribonucleotide
  misc_feature 6..7: note = DNA
  modified_base 8: mod_base = OTHER; note = 2'-O-(2-methoxyethyl) ribonucleotide
  misc_feature 9..10: note = DNA
  modified_base 11: mod_base = OTHER; note = 2'-O-(2-methoxyethyl) ribonucleotide
  misc_feature 12..13: note = DNA
  modified_base 14: mod_base = OTHER; note = 2'-O-(2-methoxyethyl) ribonucleotide
  misc_feature 15: note = DNA
  modified_base 16..20: mod_base = OTHER; note = 2'-O-(2-methoxyethyl) ribonucleotide
  modified_base 1: mod_base = OTHER; note = 5-methyl cytidine
  modified_base 5..7: mod_base = OTHER; note = 5-methyl cytidine
  modified_base 10: mod_base = OTHER; note = 5-methyl cytidine
  modified_base 12..14: mod_base = OTHER; note = 5-methyl cytidine
  modified_base 17: mod_base = OTHER; note = 5-methyl cytidine
  modified_base 20: mod_base = OTHER; note = 5-methyl cytidine
ctggcccatctcccatcatc

SEQ ID NO: 1234 - DNA, 20 bp, synthetic construct
  source 1..20: mol_type = other DNA
  modified_base 1..20: mod_base = OTHER; note = Phosphorothioate linkage
  modified_base 1..5: mod_base = OTHER; note = locked nucleic acid
  misc_feature 6..7: note = DNA
  modified_base 8: mod_base = OTHER; note = 2'-O-(2-methoxyethyl) ribonucleotide
  misc_feature 9..10: note = DNA
  modified_base 11: mod_base = OTHER; note = 2'-O-(2-methoxyethyl) ribonucleotide
  misc_feature 12..13: note = DNA
  modified_base 14: mod_base = OTHER; note = 2'-O-(2-methoxyethyl) ribonucleotide
  misc_feature 15: note = DNA
  modified_base 16..20: mod_base = OTHER; note = 2'-O-(2-methoxyethyl) ribonucleotide
  modified_base 1: mod_base = OTHER; note = 5-methyl cytidine
  modified_base 5..7: mod_base = OTHER; note = 5-methyl cytidine
  modified_base 10: mod_base = OTHER; note = 5-methyl cytidine
  modified_base 12..14: mod_base = OTHER; note = 5-methyl cytidine
  modified_base 17: mod_base = OTHER; note = 5-methyl cytidine
  modified_base 20: mod_base = OTHER; note = 5-methyl cytidine
ctggcccatctcccatcatc

SEQ ID NO: 1235 - DNA, 20 bp, synthetic construct
  source 1..20: mol_type = other DNA
  modified_base 1..20: mod_base = OTHER; note = Phosphorothioate linkage
  modified_base 1: mod_base = OTHER; note = locked nucleic acid
  modified_base 2..4: mod_base = OTHER; note = 2'-O-(2-methoxyethyl) ribonucleotide
  misc_feature 6..15: note = DNA
  modified_base 16..19: mod_base = OTHER; note = 2'-O-(2-methoxyethyl) ribonucleotide
  modified_base 20: mod_base = OTHER; note = locked nucleic acid
  modified_base 1: mod_base = OTHER; note = 5-methyl cytidine
  modified_base 5..7: mod_base = OTHER; note = 5-methyl cytidine
  modified_base 10: mod_base = OTHER; note = 5-methyl cytidine
  modified_base 12..14: mod_base = OTHER; note = 5-methyl cytidine
  modified_base 17: mod_base = OTHER; note = 5-methyl cytidine
  modified_base 20: mod_base = OTHER; note = 5-methyl cytidine
ctggcccatctcccatcatc

SEQ ID NO: 1236 - DNA, 20 bp, synthetic construct
  source 1..20: mol_type = other DNA
  modified_base 1..20: mod_base = OTHER; note = Phosphorothioate linkage
  modified_base 1: mod_base = OTHER; note = locked nucleic acid
  modified_base 2: mod_base = OTHER; note = 2'-O-(2-methoxyethyl) ribonucleotide
  modified_base 3: mod_base = OTHER; note = locked nucleic acid
  modified_base 4..5: mod_base = OTHER; note = 2'-O-(2-methoxyethyl) ribonucleotide
  misc_feature 6..15: note = DNA
  modified_base 16..17: mod_base = OTHER; note = 2'-O-(2-methoxyethyl) ribonucleotide
  modified_base 18: mod_base = OTHER; note = locked nucleic acid
  modified_base 19: mod_base = OTHER; note = 2'-O-(2-methoxyethyl) ribonucleotide
  modified_base 20: mod_base = OTHER; note = locked nucleic acid
  modified_base 1: mod_base = OTHER; note = 5-methyl cytidine
  modified_base 5..7: mod_base = OTHER; note = 5-methyl cytidine
  modified_base 10: mod_base = OTHER; note = 5-methyl cytidine
  modified_base 12..14: mod_base = OTHER; note = 5-methyl cytidine
  modified_base 17: mod_base = OTHER; note = 5-methyl cytidine
  modified_base 20: mod_base = OTHER; note = 5-methyl cytidine
ctggcccatctcccatcatc

SEQ ID NO: 1237 - DNA, 20 bp, synthetic construct
  source 1..20: mol_type = other DNA
  modified_base 1..20: mod_base = OTHER; note = Phosphorothioate linkage
  modified_base 1..5: mod_base = OTHER; note = 2'-O-(2-methoxyethyl) ribonucleotide
  misc_feature 6..15: note = DNA
  modified_base 16..20: mod_base = OTHER; note = 2'-O-(2-methoxyethyl) ribonucleotide
  modified_base 1: mod_base = OTHER; note = 5-methyl cytidine
  modified_base 5..7: mod_base = OTHER; note = 5-methyl cytidine
  modified_base 10: mod_base = OTHER; note = 5-methyl cytidine
  modified_base 12..14: mod_base = OTHER; note = 5-methyl cytidine
  modified_base 17: mod_base = OTHER; note = 5-methyl cytidine
  modified_base 20: mod_base = OTHER; note = 5-methyl cytidine
ctggcccatctcccatcatc

SEQ ID NO: 1238 - DNA, 20 bp, synthetic construct
  source 1..20: mol_type = other DNA
  modified_base 1..20: mod_base = OTHER; note = Phosphorothioate linkage
  modified_base 1..5: mod_base = OTHER; note = 2'-O-(2-methoxyethyl) ribonucleotide
  misc_feature 6..15: note = DNA
  modified_base 16..20: mod_base = OTHER; note = 2'-O-(2-methoxyethyl) ribonucleotide
  modified_base 1: mod_base = OTHER; note = 5-methyl cytidine
  modified_base 5..7: mod_base = OTHER; note = 5-methyl cytidine
  modified_base 10: mod_base = OTHER; note = 5-methyl cytidine
  modified_base 12..14: mod_base = OTHER; note = 5-methyl cytidine
  modified_base 17: mod_base = OTHER; note = 5-methyl cytidine
  modified_base 20: mod_base = OTHER; note = 5-methyl cytidine
ctggcccatctcccatcatc

SEQ ID NO: 1239 - DNA, 20 bp, synthetic construct
  source 1..20: mol_type = other DNA
  modified_base 1..20: mod_base = OTHER; note = Phosphorothioate linkage
  modified_base 1..5: mod_base = OTHER; note = 2'-O-(2-methoxyethyl) ribonucleotide
  misc_feature 6..7: note = DNA
  modified_base 8: mod_base = OTHER; note = 2'-O-(2-methoxyethyl) ribonucleotide
  misc_feature 9..10: note = DNA
  modified_base 11: mod_base = OTHER; note = 2'-O-(2-methoxyethyl) ribonucleotide
  misc_feature 12..13: note = DNA
  modified_base 14: mod_base = OTHER; note = 2'-O-(2-methoxyethyl) ribonucleotide
  misc_feature 15: note = DNA
  modified_base 16..20: mod_base = OTHER; note = 2'-O-(2-methoxyethyl) ribonucleotide
  modified_base 2: mod_base = OTHER; note = 5-methyl cytidine
  modified_base 5: mod_base = OTHER; note = 5-methyl cytidine
  modified_base 8: mod_base = OTHER; note = 5-methyl cytidine
  modified_base 12: mod_base = OTHER; note = 5-methyl cytidine
  modified_base 14..15: mod_base = OTHER; note = 5-methyl cytidine
  modified_base 18..20: mod_base = OTHER; note = 5-methyl cytidine
gctgcagcagtctccatccc

SEQ ID NO: 1240 - DNA, 20 bp, synthetic construct
  source 1..20: mol_type = other DNA
  modified_base 1..20: mod_base = OTHER; note = Phosphorothioate linkage
  modified_base 1..2: mod_base = OTHER; note = 2'-O-(2-methoxyethyl) ribonucleotide
  modified_base 3: mod_base = OTHER; note = locked nucleic acid
  modified_base 4..5: mod_base = OTHER; note = 2'-O-(2-methoxyethyl) ribonucleotide
  misc_feature 6..15: note = DNA
  modified_base 16..17: mod_base = OTHER; note = 2'-O-(2-methoxyethyl) ribonucleotide
  modified_base 18: mod_base = OTHER; note = locked nucleic acid
  modified_base 19..20: mod_base = OTHER; note = 2'-O-(2-methoxyethyl) ribonucleotide
  modified_base 2: mod_base = OTHER; note = 5-methyl cytidine
  modified_base 5: mod_base = OTHER; note = 5-methyl cytidine
  modified_base 8: mod_base = OTHER; note = 5-methyl cytidine
  modified_base 12: mod_base = OTHER; note = 5-methyl cytidine
  modified_base 14..15: mod_base = OTHER; note = 5-methyl cytidine
  modified_base 18..20: mod_base = OTHER; note = 5-methyl cytidine
gctgcagcagtctccatccc

SEQ ID NO: 1241 - DNA, 20 bp, synthetic construct
  source 1..20: mol_type = other DNA
  modified_base 1..20: mod_base = OTHER; note = Phosphorothioate linkage
  modified_base 1: mod_base = OTHER; note = locked nucleic acid
  modified_base 2..5: mod_base = OTHER; note = 2'-O-(2-methoxyethyl) ribonucleotide
  misc_feature 6..15: note = DNA
  modified_base 16..19: mod_base = OTHER; note = 2'-O-(2-methoxyethyl) ribonucleotide
  modified_base 20: mod_base = OTHER; note = locked nucleic acid
  modified_base 2: mod_base = OTHER; note = 5-methyl cytidine
  modified_base 5: mod_base = OTHER; note = 5-methyl cytidine
  modified_base 8: mod_base = OTHER; note = 5-methyl cytidine
  modified_base 12: mod_base = OTHER; note = 5-methyl cytidine
  modified_base 14..15: mod_base = OTHER; note = 5-methyl cytidine
  modified_base 18..20: mod_base = OTHER; note = 5-methyl cytidine
gctgcagcagtctccatccc

SEQ ID NO: 1242 - DNA, 20 bp, synthetic construct
  source 1..20: mol_type = other DNA
  modified_base 1..20: mod_base = OTHER; note = Phosphorothioate linkage
  modified_base 1: mod_base = OTHER; note = locked nucleic acid
  modified_base 2: mod_base = OTHER; note = 2'-O-(2-methoxyethyl) ribonucleotide
  modified_base 3: mod_base = OTHER; note = locked nucleic acid
  modified_base 4..5: mod_base = OTHER; note = 2'-O-(2-methoxyethyl) ribonucleotide
  misc_feature 6..15: note = DNA
  modified_base 16..17: mod_base = OTHER; note = 2'-O-(2-methoxyethyl) ribonucleotide
  modified_base 18: mod_base = OTHER; note = locked nucleic acid
  modified_base 19: mod_base = OTHER; note = 2'-O-(2-methoxyethyl) ribonucleotide
  modified_base 20: mod_base = OTHER; note = locked nucleic acid
  modified_base 2: mod_base = OTHER; note = 5-methyl cytidine
  modified_base 5: mod_base = OTHER; note = 5-methyl cytidine
  modified_base 8: mod_base = OTHER; note = 5-methyl cytidine
  modified_base 12: mod_base = OTHER; note = 5-methyl cytidine
  modified_base 14..15: mod_base = OTHER; note = 5-methyl cytidine
  modified_base 18..20: mod_base = OTHER; note = 5-methyl cytidine
gctgcagcagtctccatccc

SEQ ID NO: 1243 - DNA, 20 bp, synthetic construct
  source 1..20: mol_type = other DNA
  modified_base 1..20: mod_base = OTHER; note = Phosphorothioate linkage
  modified_base 1..5: mod_base = OTHER; note = 2'-O-(2-methoxyethyl) ribonucleotide
  misc_feature 6..15: note = DNA
  modified_base 16..20: mod_base = OTHER; note = 2'-O-(2-methoxyethyl) ribonucleotide
  modified_base 2: mod_base = OTHER; note = 5-methyl cytidine
  modified_base 5: mod_base = OTHER; note = 5-methyl cytidine
  modified_base 8: mod_base = OTHER; note = 5-methyl cytidine
  modified_base 12: mod_base = OTHER; note = 5-methyl cytidine
  modified_base 14..15: mod_base = OTHER; note = 5-methyl cytidine
  modified_base 18..20: mod_base = OTHER; note = 5-methyl cytidine
gctgcagcagtctccatccc

SEQ ID NO: 1244 - DNA, 20 bp, synthetic construct
  source 1..20: mol_type = other DNA
  modified_base 1..20: mod_base = OTHER; note = Phosphorothioate linkage
  modified_base 1..5: mod_base = OTHER; note = 2'-O-(2-methoxyethyl) ribonucleotide
  misc_feature 6..15: note = DNA
  modified_base 16..20: mod_base = OTHER; note = 2'-O-(2-methoxyethyl) ribonucleotide
  modified_base 2: mod_base = OTHER; note = 5-methyl cytidine
  modified_base 5: mod_base = OTHER; note = 5-methyl cytidine
  modified_base 8: mod_base = OTHER; note = 5-methyl cytidine
  modified_base 12: mod_base = OTHER; note = 5-methyl cytidine
  modified_base 14..15: mod_base = OTHER; note = 5-methyl cytidine
  modified_base 18..20: mod_base = OTHER; note = 5-methyl cytidine
gctgcagcagtctccatccc

SEQ ID NO: 1245 - DNA, 22 bp, synthetic construct
  source 1..22: mol_type = other DNA
  modified_base 1..22: mod_base = OTHER; note = Phosphorothioate linkage
gtaggtgctggcttcttcccct

SEQ ID NO: 1246 - DNA, 24 bp, synthetic construct
  source 1..24: mol_type = other DNA
  modified_base 1..24: mod_base = OTHER; note = Phosphorothioate linkage
  modified_base 1..7: mod_base = OTHER; note = 2'-O-(2-methoxyethyl) ribonucleotide
  misc_feature 8..17: note = DNA
  modified_base 18..24: mod_base = OTHER; note = 2'-O-(2-methoxyethyl) ribonucleotide
  modified_base 9: mod_base = OTHER; note = 5-methyl cytidine
  modified_base 13: mod_base = OTHER; note = 5-methyl cytidine
  modified_base 8: mod_base = OTHER; note = 5-methyl cytidine
  modified_base 16: mod_base = OTHER; note = 5-methyl cytidine
  modified_base 19..22: mod_base = OTHER; note = 5-methyl cytidine
  modified_base 24: mod_base = OTHER; note = 5-methyl cytidine
ggtaggtgctggcttcttcccctc

SEQ ID NO: 1247 - DNA, 22 bp, synthetic construct
  source 1..22: mol_type = other DNA
  modified_base 1..22: mod_base = OTHER; note = Phosphorothioate linkage
  modified_base 1..6: mod_base = OTHER; note = 2'-O-(2-methoxyethyl) ribonucleotide
  misc_feature 7..16: note = DNA
  modified_base 17..22: mod_base = OTHER; note = 2'-O-(2-methoxyethyl) ribonucleotide
  modified_base 3..4: mod_base = OTHER; note = 5-methyl cytidine
  modified_base 12: mod_base = OTHER; note = 5-methyl cytidine
  modified_base 21..22: mod_base = OTHER; note = 5-methyl cytidine
ggccatgtgagcttgaggttcc

SEQ ID NO: 1248 - DNA, 24 bp, synthetic construct
  source 1..24: mol_type = other DNA
  modified_base 1..24: mod_base = OTHER; note = Phosphorothioate linkage
  modified_base 1..7: mod_base = OTHER; note = 2'-O-(2-methoxyethyl) ribonucleotide
  misc_feature 8..17: note = DNA
  modified_base 18..24: mod_base = OTHER; note = 2'-O-(2-methoxyethyl) ribonucleotide
  modified_base 4..5: mod_base = OTHER; note = 5-methyl cytidine
  modified_base 13: mod_base = OTHER; note = 5-methyl cytidine
  modified_base 22..24: mod_base = OTHER; note = 5-methyl cytidine
gggccatgtgagcttgaggttccc

SEQ ID NO: 1249 - DNA, 22 bp, synthetic construct
  source 1..22: mol_type = other DNA
  modified_base 1..22: mod_base = OTHER; note = Phosphorothioate linkage
  modified_base 1..6: mod_base = OTHER; note = 2'-O-(2-methoxyethyl) ribonucleotide
  misc_feature 7..16: note = DNA
  modified_base 17..22: mod_base = OTHER; note = 2'-O-(2-methoxyethyl) ribonucleotide
  modified_base 1: mod_base = OTHER; note = 5-methyl cytidine
  modified_base 5: mod_base = OTHER; note = 5-methyl cytidine
  modified_base 9: mod_base = OTHER; note = 5-methyl cytidine
  modified_base 11..15: mod_base = OTHER; note = 5-methyl cytidine
  modified_base 19: mod_base = OTHER; note = 5-methyl cytidine
  modified_base 21..22: mod_base = OTHER; note = 5-methyl cytidine
ctagcaaactcccccaggcgcc

SEQ ID NO: 1250 - DNA, 24 bp, synthetic construct
  source 1..24: mol_type = other DNA
  modified_base 1..24: mod_base = OTHER; note = Phosphorothioate linkage
  modified_base 1..7: mod_base = OTHER; note = 2'-O-(2-methoxyethyl) ribonucleotide
  misc_feature 8..17: note = DNA
  modified_base 18..24: mod_base = OTHER; note = 2'-O-(2-methoxyethyl) ribonucleotide
  modified_base 2: mod_base = OTHER; note = 5-methyl cytidine
  modified_base 6: mod_base = OTHER; note = 5-methyl cytidine
  modified_base 10: mod_base = OTHER; note = 5-methyl cytidine
  modified_base 12..15: mod_base = OTHER; note = 5-methyl cytidine
  modified_base 19: mod_base = OTHER; note = 5-methyl cytidine
  modified_base 21..22: mod_base = OTHER; note = 5-methyl cytidine
tctagcaaactcccccaggcgcct

SEQ ID NO: 1251 - DNA, 22 bp, synthetic construct
  source 1..22: mol_type = other DNA
  modified_base 1..22: mod_base = OTHER; note = Phosphorothioate linkage
  modified_base 1..6: mod_base = OTHER; note = 2'-O-(2-methoxyethyl) ribonucleotide
  misc_feature 7..16: note = DNA
  modified_base 17..22: mod_base = OTHER; note = 2'-O-(2-methoxyethyl) ribonucleotide
  modified_base 1..2: mod_base = OTHER; note = 5-methyl cytidine
  modified_base 6..8: mod_base = OTHER; note = 5-methyl cytidine
  modified_base 11: mod_base = OTHER; note = 5-methyl cytidine
  modified_base 13..15: mod_base = OTHER; note = 5-methyl cytidine
  modified_base 18: mod_base = OTHER; note = 5-methyl cytidine
  modified_base 21..22: mod_base = OTHER; note = 5-methyl cytidine
cctggcccatctcccatcatcc

SEQ ID NO: 1252 - DNA, 24 bp, synthetic construct
  source 1..24: mol_type = other DNA
  modified_base 1..24: mod_base = OTHER; note = Phosphorothioate linkage
  modified_base 1..7: mod_base = OTHER; note = 2'-O-(2-methoxyethyl) ribonucleotide
  misc_feature 8..17: note = DNA
  modified_base 18..24: mod_base = OTHER; note = 2'-O-(2-methoxyethyl) ribonucleotide
  modified_base 2..3: mod_base = OTHER; note = 5-methyl cytidine
  modified_base 7..9: mod_base = OTHER; note = 5-methyl cytidine
  modified_base 12: mod_base = OTHER; note = 5-methyl cytidine
  modified_base 14..16: mod_base = OTHER; note = 5-methyl cytidine
  modified_base 19: mod_base = OTHER; note = 5-methyl cytidine
  modified_base 22..23: mod_base = OTHER; note = 5-methyl cytidine
tcctggcccatctcccatcatcca

SEQ ID NO: 1253 - DNA, 22 bp, synthetic construct
  source 1..22: mol_type = other DNA
  modified_base 1..22: mod_base = OTHER; note = Phosphorothioate linkage
  modified_base 1..6: mod_base = OTHER; note = 2'-O-(2-methoxyethyl) ribonucleotide
  misc_feature 7..16: note = DNA
  modified_base 17..22: mod_base = OTHER; note = 2'-O-(2-methoxyethyl) ribonucleotide
  modified_base 3: mod_base = OTHER; note = 5-methyl cytidine
  modified_base 6: mod_base = OTHER; note = 5-methyl cytidine
  modified_base 9: mod_base = OTHER; note = 5-methyl cytidine
  modified_base 13: mod_base = OTHER; note = 5-methyl cytidine
  modified_base 15..16: mod_base = OTHER; note = 5-methyl cytidine
  modified_base 19..22: mod_base = OTHER; note = 5-methyl cytidine
ggctgcagcagtctccatcccc

SEQ ID NO: 1254 - DNA, 24 bp, synthetic construct
  source 1..24: mol_type = other DNA
  modified_base 1..24: mod_base = OTHER; note = Phosphorothioate linkage
  modified_base 1..7: mod_base = OTHER; note = 2'-O-(2-methoxyethyl) ribonucleotide
  misc_feature 8..17: note = DNA
  modified_base 18..24: mod_base = OTHER; note = 2'-O-(2-methoxyethyl) ribonucleotide
  modified_base 4: mod_base = OTHER; note = 5-methyl cytidine
  modified_base 7: mod_base = OTHER; note = 5-methyl cytidine
  modified_base 10: mod_base = OTHER; note = 5-methyl cytidine
  modified_base 14: mod_base = OTHER; note = 5-methyl cytidine
  modified_base 16..17: mod_base = OTHER; note = 5-methyl cytidine
  modified_base 20..23: mod_base = OTHER; note = 5-methyl cytidine
aggctgcagcagtctccatcccct

SEQ ID NO: 1255 - DNA, 20 bp, synthetic construct
  source 1..20: mol_type = other DNA
  modified_base 1..20: mod_base = OTHER; note = Phosphorothioate linkage
  modified_base 1..5: mod_base = OTHER; note = 2'-O-(2-methoxyethyl) ribonucleotide
  misc_feature 6..7: note = DNA
  modified_base 8: mod_base = OTHER; note = 2'-O-(2-methoxyethyl) ribonucleotide
  misc_feature 9..10: note = DNA
  modified_base 11: mod_base = OTHER; note = 2'-O-(2-methoxyethyl) ribonucleotide
  misc_feature 12..13: note = DNA
  modified_base 14: mod_base = OTHER; note = 2'-O-(2-methoxyethyl) ribonucleotide
  misc_feature 15: note = DNA
  modified_base 16..20: mod_base = OTHER; note = 2'-O-(2-methoxyethyl) ribonucleotide
  modified_base 1..4: mod_base = OTHER; note = 5-methyl cytidine
  modified_base 9: mod_base = OTHER; note = 5-methyl cytidine
  modified_base 11: mod_base = OTHER; note = 5-methyl cytidine
  modified_base 13: mod_base = OTHER; note = 5-methyl cytidine
ccccttggcactcggagttg

SEQ ID NO: 1256 - RNA, 20 nt, synthetic construct
  source 1..20: mol_type = other RNA
  modified_base 1..20: mod_base = OTHER; note = Phosphorothioate linkage
  modified_base 1..2: mod_base = OTHER; note = 2'-O-(2-methoxyethyl) ribonucleotide
  modified_base 3: mod_base = OTHER; note = locked nucleic acid
  modified_base 4..5: mod_base = OTHER; note = 2'-O-(2-methoxyethyl) ribonucleotide
  modified_base 6: mod_base = OTHER; note = locked nucleic acid
  modified_base 7..8: mod_base = OTHER; note = 2'-O-(2-methoxyethyl) ribonucleotide
  modified_base 9: mod_base = OTHER; note = locked nucleic acid
  modified_base 10..11: mod_base = OTHER; note = 2'-O-(2-methoxyethyl) ribonucleotide
  modified_base 12: mod_base = OTHER; note = locked nucleic acid
  modified_base 13..14: mod_base = OTHER; note = 2'-O-(2-methoxyethyl) ribonucleotide
  modified_base 15: mod_base = OTHER; note = locked nucleic acid
  modified_base 16..17: mod_base = OTHER; note = 2'-O-(2-methoxyethyl) ribonucleotide
  modified_base 18: mod_base = OTHER; note = locked nucleic acid
  modified_base 19..20: mod_base = OTHER; note = 2'-O-(2-methoxyethyl) ribonucleotide
  modified_base 1..4: mod_base = OTHER; note = 5-methyl cytidine
  modified_base 9: mod_base = OTHER; note = 5-methyl cytidine
  modified_base 11: mod_base = OTHER; note = 5-methyl cytidine
  modified_base 13: mod_base = OTHER; note = 5-methyl cytidine
ccccttggcactcggagttg

SEQ ID NO: 1257 - RNA, 20 nt, synthetic construct
  source 1..20: mol_type = other RNA
  modified_base 1..20: mod_base = OTHER; note = Phosphorothioate linkage
  modified_base 1..4: mod_base = OTHER; note = 2'-O-(2-methoxyethyl) ribonucleotide
  modified_base 5: mod_base = OTHER; note = locked nucleic acid
  modified_base 6..8: mod_base = OTHER; note = 2'-O-(2-methoxyethyl) ribonucleotide
  modified_base 9: mod_base = OTHER; note = locked nucleic acid
  modified_base 10..12: mod_base = OTHER; note = 2'-O-(2-methoxyethyl) ribonucleotide
  modified_base 13: mod_base = OTHER; note = locked nucleic acid
  modified_base 14..16: mod_base = OTHER; note = 2'-O-(2-methoxyethyl) ribonucleotide
  modified_base 17: mod_base = OTHER; note = locked nucleic acid
  modified_base 18..20: mod_base = OTHER; note = 2'-O-(2-methoxyethyl) ribonucleotide
  modified_base 1..4: mod_base = OTHER; note = 5-methyl cytidine
  modified_base 9: mod_base = OTHER; note = 5-methyl cytidine
  modified_base 11: mod_base = OTHER; note = 5-methyl cytidine
  modified_base 13: mod_base = OTHER; note = 5-methyl cytidine
ccccttggcactcggagttg

SEQ ID NO: 1258 - RNA, 20 nt, synthetic construct
  source 1..20: mol_type = other RNA
  modified_base 1..20: mod_base = OTHER; note = Phosphorothioate linkage
  modified_base 1..3: mod_base = OTHER; note = 2'-O-(2-methoxyethyl) ribonucleotide
  modified_base 4: mod_base = OTHER; note = locked nucleic acid
  modified_base 5..7: mod_base = OTHER; note = 2'-O-(2-methoxyethyl) ribonucleotide
  modified_base 8: mod_base = OTHER; note = locked nucleic acid
  modified_base 9..11: mod_base = OTHER; note = 2'-O-(2-methoxyethyl) ribonucleotide
  modified_base 12: mod_base = OTHER; note = locked nucleic acid
  modified_base 13..15: mod_base = OTHER; note = 2'-O-(2-methoxyethyl) ribonucleotide
  modified_base 16: mod_base = OTHER; note = locked nucleic acid
  modified_base 17..20: mod_base = OTHER; note = 2'-O-(2-methoxyethyl) ribonucleotide
  modified_base 1..4: mod_base = OTHER; note = 5-methyl cytidine
  modified_base 9: mod_base = OTHER; note = 5-methyl cytidine
  modified_base 11: mod_base = OTHER; note = 5-methyl cytidine
  modified_base 13: mod_base = OTHER; note = 5-methyl cytidine
ccccttggcactcggagttg

SEQ ID NO: 1259 - RNA, 20 nt, synthetic construct
  source 1..20: mol_type = other RNA
  modified_base 1..20: mod_base = OTHER; note = Phosphorothioate linkage
  modified_base 1: mod_base = OTHER; note = 2'-O-(2-methoxyethyl) ribonucleotide
  modified_base 2: mod_base = OTHER; note = locked nucleic acid
  modified_base 3..4: mod_base = OTHER; note = 2'-O-(2-methoxyethyl) ribonucleotide
  modified_base 5: mod_base = OTHER; note = locked nucleic acid
  modified_base 6..7: mod_base = OTHER; note = 2'-O-(2-methoxyethyl) ribonucleotide
  modified_base 8: mod_base = OTHER; note = locked nucleic acid
  modified_base 9..10: mod_base = OTHER; note = 2'-O-(2-methoxyethyl) ribonucleotide
  modified_base 11: mod_base = OTHER; note = locked nucleic acid
  modified_base 12..13: mod_base = OTHER; note = 2'-O-(2-methoxyethyl) ribonucleotide
  modified_base 14: mod_base = OTHER; note = locked nucleic acid
  modified_base 15..16: mod_base = OTHER; note = 2'-O-(2-methoxyethyl) ribonucleotide
  modified_base 17: mod_base = OTHER; note = locked nucleic acid
  modified_base 18..19: mod_base = OTHER; note = 2'-O-(2-methoxyethyl) ribonucleotide
  modified_base 20: mod_base = OTHER; note = locked nucleic acid
  modified_base 1..4: mod_base = OTHER; note = 5-methyl cytidine
  modified_base 10: mod_base = OTHER; note = 5-methyl cytidine
  modified_base 12: mod_base = OTHER; note = 5-methyl cytidine
  modified_base 14: mod_base = OTHER; note = 5-methyl cytidine
ccccttggcactcggagttg

SEQ ID NO: 1260 - RNA, 20 nt, synthetic construct
  source 1..20: mol_type = other RNA
  modified_base 1..20: mod_base = OTHER; note = Phosphorothioate linkage
  modified_base 1: mod_base = OTHER; note = locked nucleic acid
  modified_base 2..3: mod_base = OTHER; note = 2'-O-(2-methoxyethyl) ribonucleotide
  modified_base 4: mod_base = OTHER; note = locked nucleic acid
  modified_base 5..6: mod_base = OTHER; note = 2'-O-(2-methoxyethyl) ribonucleotide
  modified_base 7: mod_base = OTHER; note = locked nucleic acid
  modified_base 8..9: mod_base = OTHER; note = 2'-O-(2-methoxyethyl) ribonucleotide
  modified_base 10: mod_base = OTHER; note = locked nucleic acid
  modified_base 11..12: mod_base = OTHER; note = 2'-O-(2-methoxyethyl) ribonucleotide
  modified_base 13: mod_base = OTHER; note = locked nucleic acid
  modified_base 14..15: mod_base = OTHER; note = 2'-O-(2-methoxyethyl) ribonucleotide
  modified_base 16: mod_base = OTHER; note = locked nucleic acid
  modified_base 17..18: mod_base = OTHER; note = 2'-O-(2-methoxyethyl) ribonucleotide
  modified_base 19: mod_base = OTHER; note = locked nucleic acid
  modified_base 20: mod_base = OTHER; note = 2'-O-(2-methoxyethyl) ribonucleotide
  modified_base 1..4: mod_base = OTHER; note = 5-methyl cytidine
  modified_base 9: mod_base = OTHER; note = 5-methyl cytidine
  modified_base 11: mod_base = OTHER; note = 5-methyl cytidine
  modified_base 13: mod_base = OTHER; note = 5-methyl cytidine
ccccttggcactcggagttg

SEQ ID NO: 1261 - DNA, 22 bp, synthetic construct
  source 1..22: mol_type = other DNA
  modified_base 1..22: mod_base = OTHER; note = Phosphorothioate linkage
  modified_base 1..6: mod_base = OTHER; note = 2'-O-(2-methoxyethyl) ribonucleotide
  misc_feature 7..16: note = DNA
  modified_base 17..22: mod_base = OTHER; note = 2'-O-(2-methoxyethyl) ribonucleotide
  modified_base 2..5: mod_base = OTHER; note = 5-methyl cytidine
  modified_base 10: mod_base = OTHER; note = 5-methyl cytidine
  modified_base 12: mod_base = OTHER; note = 5-methyl cytidine
  modified_base 14: mod_base = OTHER; note = 5-methyl cytidine
tccccttggcactcggagttgg

SEQ ID NO: 1262 - RNA, 22 nt, synthetic construct
  source 1..22: mol_type = other RNA
  modified_base 1..22: mod_base = OTHER; note = Phosphorothioate linkage
  modified_base 1..22: mod_base = OTHER; note = 2'-O-(2-methoxyethyl) ribonucleotide
  modified_base 2..5: mod_base = OTHER; note = 5-methyl cytidine
  modified_base 10: mod_base = OTHER; note = 5-methyl cytidine
  modified_base 12: mod_base = OTHER; note = 5-methyl cytidine
  modified_base 14: mod_base = OTHER; note = 5-methyl cytidine
tccccttggcactcggagttgg

SEQ ID NO: 1263 - DNA, 24 bp, synthetic construct
  source 1..24: mol_type = other DNA
  modified_base 1..24: mod_base = OTHER; note = Phosphorothioate linkage
  modified_base 1..7: mod_base = OTHER; note = 2'-O-(2-methoxyethyl) ribonucleotide
  misc_feature 8..17: note = DNA
  modified_base 18..24: mod_base = OTHER; note = 2'-O-(2-methoxyethyl) ribonucleotide
  modified_base 1: mod_base = OTHER; note = 5-methyl cytidine
  modified_base 3..6: mod_base = OTHER; note = 5-methyl cytidine
  modified_base 11: mod_base = OTHER; note = 5-methyl cytidine
  modified_base 13: mod_base = OTHER; note = 5-methyl cytidine
  modified_base 15: mod_base = OTHER; note = 5-methyl cytidine
ctccccttggcactcggagttggg

SEQ ID NO: 1264 - RNA, 24 nt, synthetic construct
  source 1..24: mol_type = other RNA
  modified_base 1..24: mod_base = OTHER; note = Phosphorothioate linkage
  modified_base 1..24: mod_base = OTHER; note = 2'-O-(2-methoxyethyl) ribonucleotide
  modified_base 1: mod_base = OTHER; note = 5-methyl cytidine
  modified_base 3..6: mod_base = OTHER; note = 5-methyl cytidine
  modified_base 11: mod_base = OTHER; note = 5-methyl cytidine
  modified_base 13: mod_base = OTHER; note = 5-methyl cytidine
  modified_base 15: mod_base = OTHER; note = 5-methyl cytidine
ctccccttggcactcggagttggg

SEQ ID NO: 1265 - RNA, 20 nt, synthetic construct
  source 1..20: mol_type = other RNA
  modified_base 1..20: mod_base = OTHER; note = Phosphorothioate linkage
  modified_base 1..5: mod_base = OTHER; note = 2'-O-(2-methoxyethyl) ribonucleotide
  modified_base 6: mod_base = OTHER; note = locked nucleic acid
  modified_base 7..8: mod_base = OTHER; note = 2'-O-(2-methoxyethyl) ribonucleotide
  modified_base 9: mod_base = OTHER; note = locked nucleic acid
  modified_base 10..11: mod_base = OTHER; note = 2'-O-(2-methoxyethyl) ribonucleotide
  modified_base 12: mod_base = OTHER; note = locked nucleic acid
  modified_base 13..14: mod_base = OTHER; note = 2'-O-(2-methoxyethyl) ribonucleotide
  modified_base 15: mod_base = OTHER; note = locked nucleic acid
  modified_base 16..20: mod_base = OTHER; note = 2'-O-(2-methoxyethyl) ribonucleotide
  modified_base 4: mod_base = OTHER; note = 5-methyl cytidine
  modified_base 18: mod_base = OTHER; note = 5-methyl cytidine
ggacttgggagtggtgactg

SEQ ID NO: 1266 - RNA, 20 nt, synthetic construct
  source 1..20: mol_type = other RNA
  modified_base 1..20: mod_base = OTHER; note = Phosphorothioate linkage
  modified_base 1..5: mod_base = OTHER; note = 2'-O-(2-methoxyethyl) ribonucleotide
  modified_base 6: mod_base = OTHER; note = locked nucleic acid
  modified_base 7..10: mod_base = OTHER; note = 2'-O-(2-methoxyethyl) ribonucleotide
  modified_base 11: mod_base = OTHER; note = locked nucleic acid
  modified_base 12..15: mod_base = OTHER; note = 2'-O-(2-methoxyethyl) ribonucleotide
  modified_base 16: mod_base = OTHER; note = locked nucleic acid
  modified_base 17..20: mod_base = OTHER; note = 2'-O-(2-methoxyethyl) ribonucleotide
  modified_base 4: mod_base = OTHER; note = 5-methyl cytidine
  modified_base 18: mod_base = OTHER; note = 5-methyl cytidine
ggacttgggagtggtgactg

SEQ ID NO: 1267 - RNA, 23 nt, synthetic construct
  source 1..23: mol_type = other RNA
  modified_base 1..23: mod_base = OTHER; note = Phosphorothioate linkage
  modified_base 1..3: mod_base = OTHER; note = 2'-O-(2-methoxyethyl) ribonucleotide
  modified_base 4: mod_base = OTHER; note = locked nucleic acid
  modified_base 5..8: mod_base = OTHER; note = 2'-O-(2-methoxyethyl) ribonucleotide
  modified_base 9: mod_base = OTHER; note = locked nucleic acid
  modified_base 10..13: mod_base = OTHER; note = 2'-O-(2-methoxyethyl) ribonucleotide
  modified_base 14: mod_base = OTHER; note = locked nucleic acid
  modified_base 15..18: mod_base = OTHER; note = 2'-O-(2-methoxyethyl) ribonucleotide
  modified_base 19: mod_base = OTHER; note = locked nucleic acid
  modified_base 20..23: mod_base = OTHER; note = 2'-O-(2-methoxyethyl) ribonucleotide
  modified_base 4: mod_base = OTHER; note = 5-methyl cytidine
  modified_base 18: mod_base = OTHER; note = 5-methyl cytidine
  modified_base 23: mod_base = OTHER; note = 5-methyl cytidine
ggacttgggagtggtgactgaac

SEQ ID NO: 1268 - RNA, 20 nt, synthetic construct
  source 1..20: mol_type = other RNA
  modified_base 1..3: mod_base = OTHER; note = Phosphorothioate linkage
  modified_base 5..16: mod_base = OTHER; note = Phosphorothioate linkage
  modified_base 18..20: mod_base = OTHER; note = Phosphorothioate linkage
  modified_base 1..20: mod_base = OTHER; note = 2'-O-(2-methoxyethyl) ribonucleotide
  modified_base 4: mod_base = OTHER; note = 5-methyl cytidine
  modified_base 18: mod_base = OTHER; note = 5-methyl cytidine
ggacttgggagtggtgactg

SEQ ID NO: 1269 - DNA, 20 bp, synthetic construct
  source 1..20: mol_type = other DNA
  modified_base 1..20: mod_base = OTHER; note = Phosphorothioate linkage
  modified_base 1..2: mod_base = OTHER; note = locked nucleic acid
  modified_base 3: mod_base = OTHER; note = locked nucleic acid
  modified_base 4..5: mod_base = OTHER; note = 2'-O-(2-methoxyethyl) ribonucleotide
  misc_feature 6..7: note = DNA
  modified_base 8: mod_base = OTHER; note = 2'-O-(2-methoxyethyl) ribonucleotide
  misc_feature 9..10: note = DNA
  modified_base 11: mod_base = OTHER; note = 2'-O-(2-methoxyethyl) ribonucleotide
  misc_feature 12..13: note = DNA
  modified_base 14: mod_base = OTHER; note = 2'-O-(2-methoxyethyl) ribonucleotide
  misc_feature 15: note = DNA
  modified_base 16..17: mod_base = OTHER; note = 2'-O-(2-methoxyethyl) ribonucleotide
  modified_base 18: mod_base = OTHER; note = locked nucleic acid
  modified_base 19..20: mod_base = OTHER; note = 2'-O-(2-methoxyethyl) ribonucleotide
  modified_base 2..3: mod_base = OTHER; note = 5-methyl cytidine
  modified_base 11: mod_base = OTHER; note = 5-methyl cytidine
  modified_base 19: mod_base = OTHER; note = 5-methyl cytidine
gccatgtgagcttgaggttc

SEQ ID NO: 1270 - DNA, 20 bp, synthetic construct
  source 1..20: mol_type = other DNA
  modified_base 1..20: mod_base = OTHER; note = Phosphorothioate linkage
  modified_base 1: mod_base = OTHER; note = locked nucleic acid
  modified_base 2: mod_base = OTHER; note = 2'-O-(2-methoxyethyl) ribonucleotide
  modified_base 3: mod_base = OTHER; note = locked nucleic acid
  modified_base 4..5: mod_base = OTHER; note = 2'-O-(2-methoxyethyl) ribonucleotide
  misc_feature 6..7: note = DNA
  modified_base 8: mod_base = OTHER; note = 2'-O-(2-methoxyethyl) ribonucleotide
  misc_feature 9..10: note = DNA
  modified_base 11: mod_base = OTHER; note = 2'-O-(2-methoxyethyl) ribonucleotide
  misc_feature 12..13: note = DNA
  modified_base 14: mod_base = OTHER; note = 2'-O-(2-methoxyethyl) ribonucleotide
  misc_feature 15: note = DNA
  modified_base 16..17: mod_base = OTHER; note = 2'-O-(2-methoxyethyl) ribonucleotide
  modified_base 18: mod_base = OTHER; note = locked nucleic acid
  modified_base 19: mod_base = OTHER; note = 2'-O-(2-methoxyethyl) ribonucleotide
  modified_base 20: mod_base = OTHER; note = locked nucleic acid
  modified_base 2..3: mod_base = OTHER; note = 5-methyl cytidine
  modified_base 11: mod_base = OTHER; note = 5-methyl cytidine
  modified_base 20: mod_base = OTHER; note = 5-methyl cytidine
gccatgtgagcttgaggttc

SEQ ID NO: 1271 - DNA, 20 bp, synthetic construct
  source 1..20: mol_type = other DNA
  modified_base 1..3: mod_base = OTHER; note = Phosphorothioate linkage
  modified_base 5..16: mod_base = OTHER; note = Phosphorothioate linkage
  modified_base 18..20: mod_base = OTHER; note = Phosphorothioate linkage
  modified_base 1..5: mod_base = OTHER; note = locked nucleic acid
  misc_feature 6..7: note = DNA
  modified_base 8: mod_base = OTHER; note = 2'-O-(2-methoxyethyl) ribonucleotide
  misc_feature 9..10: note = DNA
  modified_base 11: mod_base = OTHER; note = 2'-O-(2-methoxyethyl) ribonucleotide
  misc_feature 12..13: note = DNA
  modified_base 14: mod_base = OTHER; note = 2'-O-(2-methoxyethyl) ribonucleotide
  misc_feature 15: note = DNA
  modified_base 16..20: mod_base = OTHER; note = 2'-O-(2-methoxyethyl) ribonucleotide
  modified_base 2..3: mod_base = OTHER; note = 5-methyl cytidine
  modified_base 11: mod_base = OTHER; note = 5-methyl cytidine
  modified_base 20: mod_base = OTHER; note = 5-methyl cytidine
gccatgtgagcttgaggttc

SEQ ID NO: 1272 - DNA, 20 bp, synthetic construct
  source 1..20: mol_type = other DNA
  modified_base 1..3: mod_base = OTHER; note = Phosphorothioate linkage
  modified_base 5..16: mod_base = OTHER; note = Phosphorothioate linkage
  modified_base 18..20: mod_base = OTHER; note = Phosphorothioate linkage
  modified_base 1..2: mod_base = OTHER; note = 2'-O-(2-methoxyethyl) ribonucleotide
  modified_base 3: mod_base = OTHER; note = locked nucleic acid
  modified_base 4..5: mod_base = OTHER; note = 2'-O-(2-methoxyethyl) ribonucleotide
  misc_feature 6..7: note = DNA
  modified_base 8: mod_base = OTHER; note = 2'-O-(2-methoxyethyl) ribonucleotide
  misc_feature 9..10: note = DNA
  modified_base 11: mod_base = OTHER; note = 2'-O-(2-methoxyethyl) ribonucleotide
  misc_feature 12..13: note = DNA
  modified_base 14: mod_base = OTHER; note = 2'-O-(2-methoxyethyl) ribonucleotide
  misc_feature 15: note = DNA
  modified_base 16..17: mod_base = OTHER; note = 2'-O-(2-methoxyethyl) ribonucleotide
  modified_base 18: mod_base = OTHER; note = locked nucleic acid
  modified_base 19: mod_base = OTHER; note = 2'-O-(2-methoxyethyl) ribonucleotide
  modified_base 20: mod_base = OTHER; note = locked nucleic acid
  modified_base 4: mod_base = OTHER; note = 5-methyl cytidine
  modified_base 8: mod_base = OTHER; note = 5-methyl cytidine
  modified_base 10..14: mod_base = OTHER; note = 5-methyl cytidine
  modified_base 18: mod_base = OTHER; note = 5-methyl cytidine
  modified_base 20: mod_base = OTHER; note = 5-methyl cytidine
tagcaaactcccccaggcgc

SEQ ID NO: 1273 - DNA, 20 bp, synthetic construct
  source 1..20: mol_type = other DNA
  modified_base 1..20: mod_base = OTHER; note = Phosphorothioate linkage
  modified_base 1: mod_base = OTHER; note = locked nucleic acid
  modified_base 2: mod_base = OTHER; note = 2'-O-(2-methoxyethyl) ribonucleotide
  modified_base 3: mod_base = OTHER; note = locked nucleic acid
  modified_base 4..5: mod_base = OTHER; note = 2'-O-(2-methoxyethyl) ribonucleotide
  misc_feature 6..7: note = DNA
  modified_base 8: mod_base = OTHER; note = 2'-O-(2-methoxyethyl) ribonucleotide
  misc_feature 9..10: note = DNA
  modified_base 11: mod_base = OTHER; note = 2'-O-(2-methoxyethyl) ribonucleotide
  misc_feature 12..13: note = DNA
  modified_base 14: mod_base = OTHER; note = 2'-O-(2-methoxyethyl) ribonucleotide
  misc_feature 15: note = DNA
  modified_base 16..17: mod_base = OTHER; note = 2'-O-(2-methoxyethyl) ribonucleotide
  modified_base 18: mod_base = OTHER; note = locked nucleic acid
  modified_base 19: mod_base = OTHER; note = 2'-O-(2-methoxyethyl) ribonucleotide
  modified_base 20: mod_base = OTHER; note = locked nucleic acid
  modified_base 4: mod_base = OTHER; note = 5-methyl cytidine
  modified_base 8: mod_base = OTHER; note = 5-methyl cytidine
  modified_base 10..14: mod_base = OTHER; note = 5-methyl cytidine
  modified_base 18: mod_base = OTHER; note = 5-methyl cytidine
  modified_base 20: mod_base = OTHER; note = 5-methyl cytidine
tagcaaactcccccaggcgc

SEQ ID NO: 1274 - DNA, 20 bp, synthetic construct
  source 1..20: mol_type = other DNA
  modified_base 1..20: mod_base = OTHER; note = Phosphorothioate linkage
  modified_base 1..2: mod_base = OTHER; note = 2'-O-(2-methoxyethyl) ribonucleotide
  modified_base 3: mod_base = OTHER; note = locked nucleic acid
  modified_base 4..5: mod_base = OTHER; note = 2'-O-(2-methoxyethyl) ribonucleotide
  misc_feature 6..7: note = DNA
  modified_base 8: mod_base = OTHER; note = 2'-O-(2-methoxyethyl) ribonucleotide
  misc_feature 9..10: note = DNA
  modified_base 11: mod_base = OTHER; note = 2'-O-(2-methoxyethyl) ribonucleotide
  misc_feature 12..13: note = DNA
  modified_base 14: mod_base = OTHER; note = 2'-O-(2-methoxyethyl) ribonucleotide
  misc_feature 15: note = DNA
  modified_base 16..17: mod_base = OTHER; note = 2'-O-(2-methoxyethyl) ribonucleotide
  modified_base 18: mod_base = OTHER; note = locked nucleic acid
  modified_base 19..20: mod_base = OTHER; note = 2'-O-(2-methoxyethyl) ribonucleotide
  modified_base 2: mod_base = OTHER; note = 5-methyl cytidine
  modified_base 5: mod_base = OTHER; note = 5-methyl cytidine
  modified_base 8: mod_base = OTHER; note = 5-methyl cytidine
  modified_base 12: mod_base = OTHER; note = 5-methyl cytidine
  modified_base 14..15: mod_base = OTHER; note = 5-methyl cytidine
  modified_base 18..20: mod_base = OTHER; note = 5-methyl cytidine
gctgcagcagtctccatccc

SEQ ID NO: 1275 - DNA, 20 bp, synthetic construct
  source 1..20: mol_type = other DNA
  modified_base 1..20: mod_base = OTHER; note = Phosphorothioate linkage
  modified_base 1: mod_base = OTHER; note = 2'-O-(2-methoxyethyl) ribonucleotide
  misc_feature 2..19: note = DNA
  modified_base 20: mod_base = OTHER; note = 2'-O-(2-methoxyethyl) ribonucleotide
  modified_base 2..3: mod_base = OTHER; note = 5-methyl cytidine
  modified_base 11: mod_base = OTHER; note = 5-methyl cytidine
  modified_base 20: mod_base = OTHER; note = 5-methyl cytidine
gccatgtgagcttgaggttc

SEQ ID NO: 1276 - DNA, 20 bp, synthetic construct
  source 1..20: mol_type = other DNA
  modified_base 1..20: mod_base = OTHER; note = Phosphorothioate linkage
  modified_base 1..2: mod_base = OTHER; note = 2'-O-(2-methoxyethyl) ribonucleotide
  misc_feature 3..18: note = DNA
  modified_base 19..20: mod_base = OTHER; note = 2'-O-(2-methoxyethyl) ribonucleotide
  modified_base 2..3: mod_base = OTHER; note = 5-methyl cytidine
  modified_base 11: mod_base = OTHER; note = 5-methyl cytidine
  modified_base 20: mod_base = OTHER; note = 5-methyl cytidine
gccatgtgagcttgaggttc

SEQ ID NO: 1277 - DNA, 20 bp, synthetic construct
  source 1..20: mol_type = other DNA
  modified_base 1..20: mod_base = OTHER; note = Phosphorothioate linkage
  modified_base 1..3: mod_base = OTHER; note = 2'-O-(2-methoxyethyl) ribonucleotide
  misc_feature 4..17: note = DNA
  modified_base 18..20: mod_base = OTHER; note = 2'-O-(2-methoxyethyl) ribonucleotide
  modified_base 2..3: mod_base = OTHER; note = 5-methyl cytidine
  modified_base 11: mod_base = OTHER; note = 5-methyl cytidine
  modified_base 20: mod_base = OTHER; note = 5-methyl cytidine
gccatgtgagcttgaggttc

SEQ ID NO: 1278 - DNA, 20 bp, synthetic construct
  source 1..20: mol_type = other DNA
  modified_base 1..20: mod_base = OTHER; note = Phosphorothioate linkage
  modified_base 4: mod_base = OTHER; note = 2'-O-(2-methoxyethyl) ribonucleotide
  misc_feature 5..16: note = DNA
  modified_base 17..20: mod_base = OTHER; note = 2'-O-(2-methoxyethyl) ribonucleotide
  modified_base 2..3: mod_base = OTHER; note = 5-methyl cytidine
  modified_base 11: mod_base = OTHER; note = 5-methyl cytidine
  modified_base 20: mod_base = OTHER; note = 5-methyl cytidine
gccatgtgagcttgaggttc

SEQ ID NO: 1279 - DNA, 20 bp, synthetic construct
  source 1..20: mol_type = other DNA
  modified_base 1..20: mod_base = OTHER; note = Phosphorothioate linkage
  modified_base 1..6: mod_base = OTHER; note = 2'-O-(2-methoxyethyl) ribonucleotide
  misc_feature 7..14: note = DNA
  modified_base 15..20: mod_base = OTHER; note = 2'-O-(2-methoxyethyl) ribonucleotide
  modified_base 2..3: mod_base = OTHER; note = 5-methyl cytidine
  modified_base 11: mod_base = OTHER; note = 5-methyl cytidine
  modified_base 20: mod_base = OTHER; note = 5-methyl cytidine
gccatgtgagcttgaggttc

SEQ ID NO: 1280 - DNA, 20 bp, synthetic construct
  source 1..20: mol_type = other DNA
  modified_base 1..20: mod_base = OTHER; note = Phosphorothioate linkage
  modified_base 1..7: mod_base = OTHER; note = 2'-O-(2-methoxyethyl) ribonucleotide
  misc_feature 8..13: note = DNA
  modified_base 14..20: mod_base = OTHER; note = 2'-O-(2-methoxyethyl) ribonucleotide
  modified_base 2..3: mod_base = OTHER; note = 5-methyl cytidine
  modified_base 11: mod_base = OTHER; note = 5-methyl cytidine
  modified_base 20: mod_base = OTHER; note = 5-methyl cytidine
gccatgtgagcttgaggttc

SEQ ID NO: 1281 - DNA, 20 bp, synthetic construct
  source 1..20: mol_type = other DNA
  modified_base 1..20: mod_base = OTHER; note = Phosphorothioate linkage
  modified_base 1..8: mod_base = OTHER; note = 2'-O-(2-methoxyethyl) ribonucleotide
  misc_feature 9..12: note = DNA
  modified_base 13..20: mod_base = OTHER; note = 2'-O-(2-methoxyethyl) ribonucleotide
  modified_base 2..3: mod_base = OTHER; note = 5-methyl cytidine
  modified_base 11: mod_base = OTHER; note = 5-methyl cytidine
  modified_base 20: mod_base = OTHER; note = 5-methyl cytidine
gccatgtgagcttgaggttc

SEQ ID NO: 1282 - DNA, 20 bp, synthetic construct
  source 1..20: mol_type = other DNA
  modified_base 1..20: mod_base = OTHER; note = Phosphorothioate linkage
  modified_base 1..9: mod_base = OTHER; note = 2'-O-(2-methoxyethyl) ribonucleotide
  misc_feature 10..11: note = DNA
  modified_base 12..20: mod_base = OTHER; note = 2'-O-(2-methoxyethyl) ribonucleotide
  modified_base 2..3: mod_base = OTHER; note = 5-methyl cytidine
  modified_base 11: mod_base = OTHER; note = 5-methyl cytidine
  modified_base 20: mod_base = OTHER; note = 5-methyl cytidine
gccatgtgagcttgaggttc

SEQ ID NO: 1283 - DNA, 20 bp, synthetic construct
  source 1..20: mol_type = other DNA
  modified_base 1..20: mod_base = OTHER; note = Phosphorothioate linkage
  modified_base 1: mod_base = OTHER; note = 2'-O-(2-methoxyethyl) ribonucleotide
  misc_feature 2..11: note = DNA
  modified_base 12..20: mod_base = OTHER; note = 2'-O-(2-methoxyethyl) ribonucleotide
  modified_base 2..3: mod_base = OTHER; note = 5-methyl cytidine
  modified_base 11: mod_base = OTHER; note = 5-methyl cytidine
  modified_base 20: mod_base = OTHER; note = 5-methyl cytidine
gccatgtgagcttgaggttc

SEQ ID NO: 1284 - DNA, 20 bp, synthetic construct
  source 1..20: mol_type = other DNA
  modified_base 1..20: mod_base = OTHER; note = Phosphorothioate linkage
  modified_base 1..2: mod_base = OTHER; note = 2'-O-(2-methoxyethyl) ribonucleotide
  misc_feature 3..12: note = DNA
  modified_base 13..20: mod_base = OTHER; note = 2'-O-(2-methoxyethyl) ribonucleotide
  modified_base 2..3: mod_base = OTHER; note = 5-methyl cytidine
  modified_base 11: mod_base = OTHER; note = 5-methyl cytidine
  modified_base 20: mod_base = OTHER; note = 5-methyl cytidine
gccatgtgagcttgaggttc

SEQ ID NO: 1285 - DNA, 20 bp, synthetic construct
  source 1..20: mol_type = other DNA
  modified_base 1..20: mod_base = OTHER; note = Phosphorothioate linkage
  modified_base 1..3: mod_base = OTHER; note = 2'-O-(2-methoxyethyl) ribonucleotide
  misc_feature 4..13: note = DNA
  modified_base 14..20: mod_base = OTHER; note = 2'-O-(2-methoxyethyl) ribonucleotide
  modified_base 2..3: mod_base = OTHER; note = 5-methyl cytidine
  modified_base 11: mod_base = OTHER; note = 5-methyl cytidine
  modified_base 20: mod_base = OTHER; note = 5-methyl cytidine
gccatgtgagcttgaggttc

SEQ ID NO: 1286 - DNA, 20 bp, synthetic construct
  source 1..20: mol_type = other DNA
  modified_base 1..20: mod_base = OTHER; note = Phosphorothioate linkage
  modified_base 1..4: mod_base = OTHER; note = 2'-O-(2-methoxyethyl) ribonucleotide
  misc_feature 5..14: note = DNA
  modified_base 15..20: mod_base = OTHER; note = 2'-O-(2-methoxyethyl) ribonucleotide
  modified_base 2..3: mod_base = OTHER; note = 5-methyl cytidine
  modified_base 11: mod_base = OTHER; note = 5-methyl cytidine
  modified_base 20: mod_base = OTHER; note = 5-methyl cytidine
gccatgtgagcttgaggttc

SEQ ID NO: 1287 - DNA, 20 bp, synthetic construct
  source 1..20: mol_type = other DNA
  modified_base 1..20: mod_base = OTHER; note = Phosphorothioate linkage
  modified_base 1..7: mod_base = OTHER; note = 2'-O-(2-methoxyethyl) ribonucleotide
  misc_feature 8..17: note = DNA
  modified_base 18..20: mod_base = OTHER; note = 2'-O-(2-methoxyethyl) ribonucleotide
  modified_base 2..3: mod_base = OTHER; note = 5-methyl cytidine
  modified_base 11: mod_base = OTHER; note = 5-methyl cytidine
  modified_base 20: mod_base = OTHER; note = 5-methyl cytidine
gccatgtgagcttgaggttc

SEQ ID NO: 1288 - DNA, 20 bp, synthetic construct
  source 1..20: mol_type = other DNA
  modified_base 1..20: mod_base = OTHER; note = Phosphorothioate linkage
  modified_base 1..8: mod_base = OTHER; note = 2'-O-(2-methoxyethyl) ribonucleotide
  misc_feature 9..18: note = DNA
  modified_base 19..20: mod_base = OTHER; note = 2'-O-(2-methoxyethyl) ribonucleotide
  modified_base 2..3: mod_base = OTHER; note = 5-methyl cytidine
  modified_base 11: mod_base = OTHER; note = 5-methyl cytidine
  modified_base 20: mod_base = OTHER; note = 5-methyl cytidine
gccatgtgagcttgaggttc

SEQ ID NO: 1289 - DNA, 20 bp, synthetic construct
  source 1..20: mol_type = other DNA
  modified_base 1..20: mod_base = OTHER; note = Phosphorothioate linkage
  modified_base 1..9: mod_base = OTHER; note = 2'-O-(2-methoxyethyl) ribonucleotide
  misc_feature 10..19: note = DNA
  modified_base 20: mod_base = OTHER; note = 2'-O-(2-methoxyethyl) ribonucleotide
  modified_base 2..3: mod_base = OTHER; note = 5-methyl cytidine
  modified_base 11: mod_base = OTHER; note = 5-methyl cytidine
  modified_base 20: mod_base = OTHER; note = 5-methyl cytidine
gccatgtgagcttgaggttc

SEQ ID NO: 1290 - DNA, 20 bp, synthetic construct
  source 1..20: mol_type = other DNA
  modified_base 1..20: mod_base = OTHER; note = Phosphorothioate linkage
  modified_base 1..6: mod_base = OTHER; note = 2'-O-(2-methoxyethyl) ribonucleotide
  misc_feature 7..16: note = DNA
  modified_base 17..20: mod_base = OTHER; note = 2'-O-(2-methoxyethyl) ribonucleotide
  modified_base 2..3: mod_base = OTHER; note = 5-methyl cytidine
  modified_base 11: mod_base = OTHER; note = 5-methyl cytidine
  modified_base 20: mod_base = OTHER; note = 5-methyl cytidine
gccatgtgagcttgaggttc

SEQ ID NO: 1291 - DNA, 20 bp, synthetic construct
  source 1..20: mol_type = other DNA
  modified_base 1..20: mod_base = OTHER; note = Phosphorothioate linkage
  modified_base 2..3: mod_base = OTHER; note = 5-methyl cytidine
  modified_base 11: mod_base = OTHER; note = 5-methyl cytidine
  modified_base 20: mod_base = OTHER; note = 5-methyl cytidine
gccatgtgagcttgaggttc

SEQ ID NO: 1292 - DNA, 20 bp, synthetic construct
  source 1..20: mol_type = other DNA
  modified_base 1..20: mod_base = OTHER; note = Phosphorothioate linkage
  modified_base 1: mod_base = OTHER; note = 2'-O-(2-methoxyethyl) ribonucleotide
  misc_feature 2: note = DNA
  modified_base 3: mod_base = OTHER; note = 2'-O-(2-methoxyethyl) ribonucleotide
  misc_feature 4: note = DNA
  modified_base 5: mod_base = OTHER; note = 2'-O-(2-methoxyethyl) ribonucleotide
  misc_feature 6: note = DNA
  modified_base 7: mod_base = OTHER; note = 2'-O-(2-methoxyethyl) ribonucleotide
  misc_feature 8: note = DNA
  modified_base 9: mod_base = OTHER; note = 2'-O-(2-methoxyethyl) ribonucleotide
  misc_feature 10: note = DNA
  modified_base 11: mod_base = OTHER; note = 2'-O-(2-methoxyethyl) ribonucleotide
  misc_feature 12: note = DNA
  modified_base 13: mod_base = OTHER; note = 2'-O-(2-methoxyethyl) ribonucleotide
  misc_feature 14: note = DNA
  modified_base 15: mod_base = OTHER; note = 2'-O-(2-methoxyethyl) ribonucleotide
  misc_feature 16: note = DNA
  modified_base 17: mod_base = OTHER; note = 2'-O-(2-methoxyethyl) ribonucleotide
  misc_feature 18: note = DNA
  modified_base 19: mod_base = OTHER; note = 2'-O-(2-methoxyethyl) ribonucleotide
  misc_feature 20: note = DNA
  modified_base 2..3: mod_base = OTHER; note = 5-methyl cytidine
  modified_base 11: mod_base = OTHER; note = 5-methyl cytidine
  modified_base 20: mod_base = OTHER; note = 5-methyl cytidine
gccatgtgagcttgaggttc

SEQ ID NO: 1293 - DNA, 20 bp, synthetic construct
  source 1..20: mol_type = other DNA
  modified_base 1..20: mod_base = OTHER; note = Phosphorothioate linkage
  modified_base 1..7: mod_base = OTHER; note = 2'-O-(2-methoxyethyl) ribonucleotide
  misc_feature 8..12: note = DNA
  modified_base 12..20: mod_base = OTHER; note = 2'-O-(2-methoxyethyl) ribonucleotide
  modified_base 2..3: mod_base = OTHER; note = 5-methyl cytidine
  modified_base 11: mod_base = OTHER; note = 5-methyl cytidine
  modified_base 20: mod_base = OTHER; note = 5-methyl cytidine
gccatgtgagcttgaggttc

SEQ ID NO: 1294 - DNA, 20 bp, synthetic construct
  source 1..20: mol_type = other DNA
  modified_base 1..20: mod_base = OTHER; note = Phosphorothioate linkage
  modified_base 1..8: mod_base = OTHER; note = 2'-O-(2-methoxyethyl) ribonucleotide
  misc_feature 9..13: note = DNA
  modified_base 14..20: mod_base = OTHER; note = 2'-O-(2-methoxyethyl) ribonucleotide
  modified_base 2..3: mod_base = OTHER; note = 5-methyl cytidine
  modified_base 11: mod_base = OTHER; note = 5-methyl cytidine
  modified_base 20: mod_base = OTHER; note = 5-methyl cytidine
gccatgtgagcttgaggttc

SEQ ID NO: 1295 - DNA, 20 bp, synthetic construct
  source 1..20: mol_type = other DNA
  modified_base 1..20: mod_base = OTHER; note = Phosphorothioate linkage
  misc_feature 1..10: note = DNA
  modified_base 11..20: mod_base = OTHER; note = 2'-O-(2-methoxyethyl) ribonucleotide
  modified_base 2..3: mod_base = OTHER; note = 5-methyl cytidine
  modified_base 11: mod_base = OTHER; note = 5-methyl cytidine
  modified_base 20: mod_base = OTHER; note = 5-methyl cytidine
gccatgtgagcttgaggttc

SEQ ID NO: 1296 - DNA, 20 bp, synthetic construct
  source 1..20: mol_type = other DNA
  modified_base 1..20: mod_base = OTHER; note = Phosphorothioate linkage
  modified_base 1..5: mod_base = OTHER; note = 2'-O-(2-methoxyethyl) ribonucleotide
  misc_feature 6..15: note = DNA
  modified_base 16..20: mod_base = OTHER; note = 2'-O-(2-methoxyethyl) ribonucleotide
  modified_base 2..3: mod_base = OTHER; note = 5-methyl cytidine
  modified_base 11: mod_base = OTHER; note = 5-methyl cytidine
  modified_base 20: mod_base = OTHER; note = 5-methyl cytidine
gccatgtgagcttgaggttc

SEQ ID NO: 1297 - DNA, 20 bp, synthetic construct
  source 1..20: mol_type = other DNA
  modified_base 1..20: mod_base = OTHER; note = Phosphorothioate linkage
  modified_base 1..5: mod_base = OTHER; note = 2'-O-(2-methoxyethyl) ribonucleotide
  misc_feature 6..15: note = DNA
  modified_base 16..20: mod_base = OTHER; note = 2'-O-(2-methoxyethyl) ribonucleotide
  modified_base 1: mod_base = OTHER; note = 5-methyl cytidine
  modified_base 3..5: mod_base = OTHER; note = 5-methyl cytidine
  modified_base 8..9: mod_base = OTHER; note = 5-methyl cytidine
  modified_base 11: mod_base = OTHER; note = 5-methyl cytidine
  modified_base 17..18: mod_base = OTHER; note = 5-methyl cytidine
ctcccagccactttttcctg

SEQ ID NO: 1298 - DNA, 20 bp, synthetic construct
  source 1..20: mol_type = other DNA
  modified_base 1..20: mod_base = OTHER; note = Phosphorothioate linkage
  modified_base 1..5: mod_base = OTHER; note = 2'-O-(2-methoxyethyl) ribonucleotide
  misc_feature 6..15: note = DNA
  modified_base 16..20: mod_base = OTHER; note = 2'-O-(2-methoxyethyl) ribonucleotide
  modified_base 1: mod_base = OTHER; note = 5-methyl cytidine
  modified_base 3: mod_base = OTHER; note = 5-methyl cytidine
  modified_base 5..7: mod_base = OTHER; note = 5-methyl cytidine
  modified_base 10..11: mod_base = OTHER; note = 5-methyl cytidine
  modified_base 13: mod_base = OTHER; note = 5-methyl cytidine
  modified_base 19..20: mod_base = OTHER; note = 5-methyl cytidine
ctctcccagccactttttcc

SEQ ID NO: 1299 - DNA, 20 bp, synthetic construct
  source 1..20: mol_type = other DNA
  modified_base 1..20: mod_base = OTHER; note = Phosphorothioate linkage
  modified_base 1..5: mod_base = OTHER; note = 2'-O-(2-methoxyethyl) ribonucleotide
  misc_feature 6..15: note = DNA
  modified_base 16..20: mod_base = OTHER; note = 2'-O-(2-methoxyethyl) ribonucleotide
  modified_base 1: mod_base = OTHER; note = 5-methyl cytidine
  modified_base 3..4: mod_base = OTHER; note = 5-methyl cytidine
  modified_base 6: mod_base = OTHER; note = 5-methyl cytidine
  modified_base 8..10: mod_base = OTHER; note = 5-methyl cytidine
  modified_base 13..14: mod_base = OTHER; note = 5-methyl cytidine
  modified_base 16: mod_base = OTHER; note = 5-methyl cytidine
cgcctctcccagccactttt

SEQ ID NO: 1300 - DNA, 20 bp, synthetic construct
  source 1..20: mol_type = other DNA
  modified_base 1..20: mod_base = OTHER; note = Phosphorothioate linkage
  modified_base 1..5: mod_base = OTHER; note = 2'-O-(2-methoxyethyl) ribonucleotide
  misc_feature 6..15: note = DNA
  modified_base 16..20: mod_base = OTHER; note = 2'-O-(2-methoxyethyl) ribonucleotide
  modified_base 4: mod_base = OTHER; note = 5-methyl cytidine
  modified_base 7..8: mod_base = OTHER; note = 5-methyl cytidine
  modified_base 10..11: mod_base = OTHER; note = 5-methyl cytidine
  modified_base 13: mod_base = OTHER; note = 5-methyl cytidine
  modified_base 15..17: mod_base = OTHER; note = 5-methyl cytidine
  modified_base 20: mod_base = OTHER; note = 5-methyl cytidine
tagcttccgcctctcccagc

SEQ ID NO: 1301 - DNA, 20 bp, synthetic construct
  source 1..20: mol_type = other DNA
  modified_base 1..20: mod_base = OTHER; note = Phosphorothioate linkage
  modified_base 1..5: mod_base = OTHER; note = 2'-O-(2-methoxyethyl) ribonucleotide
  misc_feature 6..15: note = DNA
  modified_base 16..20: mod_base = OTHER; note = 2'-O-(2-methoxyethyl) ribonucleotide
  modified_base 2: mod_base = OTHER; note = 5-methyl cytidine
  modified_base 6: mod_base = OTHER; note = 5-methyl cytidine
  modified_base 9..10: mod_base = OTHER; note = 5-methyl cytidine
  modified_base 12..13: mod_base = OTHER; note = 5-methyl cytidine
  modified_base 15: mod_base = OTHER; note = 5-methyl cytidine
  modified_base 17..19: mod_base = OTHER; note = 5-methyl cytidine
gctagcttccgcctctccca

SEQ ID NO: 1302 - DNA, 20 bp, synthetic construct
  source 1..20: mol_type = other DNA
  modified_base 1..20: mod_base = OTHER; note = Phosphorothioate linkage
  modified_base 1..5: mod_base = OTHER; note = 2'-O-(2-methoxyethyl) ribonucleotide
  misc_feature 6..15: note = DNA
  modified_base 16..20: mod_base = OTHER; note = 2'-O-(2-methoxyethyl) ribonucleotide
  modified_base 3: mod_base = OTHER; note = 5-methyl cytidine
  modified_base 7: mod_base = OTHER; note = 5-methyl cytidine
  modified_base 10..11: mod_base = OTHER; note = 5-methyl cytidine
  modified_base 13..14: mod_base = OTHER; note = 5-methyl cytidine
  modified_base 16: mod_base = OTHER; note = 5-methyl cytidine
  modified_base 18..20: mod_base = OTHER; note = 5-methyl cytidine
agctagcttccgcctctccc

SEQ ID NO: 1303 - RNA, 20 nt, synthetic construct
  source 1..20: mol_type = other RNA
  modified_base 1..20: mod_base = OTHER; note = Phosphorothioate linkage
  modified_base 1..5: mod_base = OTHER; note = 2'-O-(2-methoxyethyl) ribonucleotide
  misc_feature 6..15: note = DNA
  modified_base 16..20: mod_base = OTHER; note = 2'-O-(2-methoxyethyl) ribonucleotide
  modified_base 1: mod_base = OTHER; note = 5-methyl cytidine
  modified_base 5: mod_base = OTHER; note = 5-methyl cytidine
  modified_base 8: mod_base = OTHER; note = 5-methyl cytidine
  modified_base 12..13: mod_base = OTHER; note = 5-methyl cytidine
  modified_base 15..16: mod_base = OTHER; note = 5-methyl cytidine
  modified_base 18: mod_base = OTHER; note = 5-methyl cytidine
  modified_base 20: mod_base = OTHER; note = 5-methyl cytidine
cgagctagcttccgcctctc

SEQ ID NO: 1304 - RNA, 20 nt, synthetic construct
  source 1..20: mol_type = other RNA
  modified_base 1..20: mod_base = OTHER; note = Phosphorothioate linkage
  modified_base 1..5: mod_base = OTHER; note = 2'-O-(2-methoxyethyl) ribonucleotide
  misc_feature 6..15: note = DNA
  modified_base 16..20: mod_base = OTHER; note = 2'-O-(2-methoxyethyl) ribonucleotide
  modified_base 3: mod_base = OTHER; note = 5-methyl cytidine
  modified_base 7: mod_base = OTHER; note = 5-methyl cytidine
  modified_base 11: mod_base = OTHER; note = 5-methyl cytidine
  modified_base 14..15: mod_base = OTHER; note = 5-methyl cytidine
  modified_base 17..18: mod_base = OTHER; note = 5-methyl cytidine
  modified_base 20: mod_base = OTHER; note = 5-methyl cytidine
gacgagctagcttccgcctc

SEQ ID NO: 1305 - RNA, 20 nt, synthetic construct
  source 1..20: mol_type = other RNA
  modified_base 1..20: mod_base = OTHER; note = Phosphorothioate linkage
  modified_base 1..5: mod_base = OTHER; note = 2'-O-(2-methoxyethyl) ribonucleotide
  misc_feature 6..15: note = DNA
  modified_base 16..20: mod_base = OTHER; note = 2'-O-(2-methoxyethyl) ribonucleotide
  modified_base 7: mod_base = OTHER; note = 5-methyl cytidine
  modified_base 11: mod_base = OTHER; note = 5-methyl cytidine
  modified_base 13: mod_base = OTHER; note = 5-methyl cytidine
  modified_base 18..19: mod_base = OTHER; note = 5-methyl cytidine
ggacgagctagcttccgcct

SEQ ID NO: 1306 - RNA, 20 nt, synthetic construct
  source 1..20: mol_type = other RNA
  modified_base 1..20: mod_base = OTHER; note = Phosphorothioate linkage
  modified_base 1..5: mod_base = OTHER; note = 2'-O-(2-methoxyethyl) ribonucleotide
  misc_feature 6..15: note = DNA
  modified_base 16..20: mod_base = OTHER; note = 2'-O-(2-methoxyethyl) ribonucleotide
  modified_base 9: mod_base = OTHER; note = 5-methyl cytidine
  modified_base 13: mod_base = OTHER; note = 5-methyl cytidine
  modified_base 17: mod_base = OTHER; note = 5-methyl cytidine
  modified_base 20: mod_base = OTHER; note = 5-methyl cytidine
gtgggacgagctagcttccg

SEQ ID NO: 1307 - RNA, 20 nt, synthetic construct
  source 1..20: mol_type = other RNA
  modified_base 1..20: mod_base = OTHER; note = Phosphorothioate linkage
  modified_base 1..5: mod_base = OTHER; note = 2'-O-(2-methoxyethyl) ribonucleotide
  misc_feature 6..15: note = DNA
  modified_base 16..20: mod_base = OTHER; note = 2'-O-(2-methoxyethyl) ribonucleotide
  modified_base 9: mod_base = OTHER; note = 5-methyl cytidine
  modified_base 13: mod_base = OTHER; note = 5-methyl cytidine
  modified_base 17: mod_base = OTHER; note = 5-methyl cytidine
  modified_base 20: mod_base = OTHER; note = 5-methyl cytidine
gggtgggacgagctagcttc

SEQ ID NO: 1308 - RNA, 20 nt, synthetic construct
  source 1..20: mol_type = other RNA
  modified_base 1..20: mod_base = OTHER; note = Phosphorothioate linkage
  modified_base 1..5: mod_base = OTHER; note = 2'-O-(2-methoxyethyl) ribonucleotide
  misc_feature 6..15: note = DNA
  modified_base 16..20: mod_base = OTHER; note = 2'-O-(2-methoxyethyl) ribonucleotide
  modified_base 2: mod_base = OTHER; note = 5-methyl cytidine
  modified_base 11: mod_base = OTHER; note = 5-methyl cytidine
  modified_base 14: mod_base = OTHER; note = 5-methyl cytidine
  modified_base 19: mod_base = OTHER; note = 5-methyl cytidine
gcgggtgggacgagctagct

SEQ ID NO: 1309 - RNA, 20 nt, synthetic construct
  source 1..20: mol_type = other RNA
  modified_base 1..20: mod_base = OTHER; note = Phosphorothioate linkage
  modified_base 1..5: mod_base = OTHER; note = 2'-O-(2-methoxyethyl) ribonucleotide
  misc_feature 6..15: note = DNA
  modified_base 16..20: mod_base = OTHER; note = 2'-O-(2-methoxyethyl) ribonucleotide
  modified_base 5: mod_base = OTHER; note = 5-methyl cytidine
  modified_base 14: mod_base = OTHER; note = 5-methyl cytidine
  modified_base 18: mod_base = OTHER; note = 5-methyl cytidine
gttgcgggtgggacgagcta

SEQ ID NO: 1310 - RNA, 20 nt, synthetic construct
  source 1..20: mol_type = other RNA
  modified_base 1..20: mod_base = OTHER; note = Phosphorothioate linkage
  modified_base 1..5: mod_base = OTHER; note = 2'-O-(2-methoxyethyl) ribonucleotide
  misc_feature 6..15: note = DNA
  modified_base 16..20: mod_base = OTHER; note = 2'-O-(2-methoxyethyl) ribonucleotide
  modified_base 7: mod_base = OTHER; note = 5-methyl cytidine
  modified_base 16: mod_base = OTHER; note = 5-methyl cytidine
  modified_base 20: mod_base = OTHER; note = 5-methyl cytidine
ttgttgcgggtgggacgagc

SEQ ID NO: 1311 - RNA, 20 nt, synthetic construct
  source 1..20: mol_type = other RNA
  modified_base 1..20: mod_base = OTHER; note = Phosphorothioate linkage
  modified_base 1..5: mod_base = OTHER; note = 2'-O-(2-methoxyethyl) ribonucleotide
  misc_feature 6..15: note = DNA
  modified_base 16..20: mod_base = OTHER; note = 2'-O-(2-methoxyethyl) ribonucleotide
  modified_base 1: mod_base = OTHER; note = 5-methyl cytidine
  modified_base 3: mod_base = OTHER; note = 5-methyl cytidine
  modified_base 10: mod_base = OTHER; note = 5-methyl cytidine
  modified_base 12..13: mod_base = OTHER; note = 5-methyl cytidine
  modified_base 19: mod_base = OTHER; note = 5-methyl cytidine
ctcttgttgcgggtgggacg

SEQ ID NO: 1312 - RNA, 20 nt, synthetic construct
  source 1..20: mol_type = other RNA
  modified_base 1..20: mod_base = OTHER; note = Phosphorothioate linkage
  modified_base 1..5: mod_base = OTHER; note = 2'-O-(2-methoxyethyl) ribonucleotide
  misc_feature 6..15: note = DNA
  modified_base 16..20: mod_base = OTHER; note = 2'-O-(2-methoxyethyl) ribonucleotide
  modified_base 2..3: mod_base = OTHER; note = 5-methyl cytidine
  modified_base 5: mod_base = OTHER; note = 5-methyl cytidine
  modified_base 12: mod_base = OTHER; note = 5-methyl cytidine
tcctcttgttgcgggtggga

SEQ ID NO: 1313 - RNA, 20 nt, synthetic construct
  source 1..20: mol_type = other RNA
  modified_base 1..20: mod_base = OTHER; note = Phosphorothioate linkage
  modified_base 1..5: mod_base = OTHER; note = 2'-O-(2-methoxyethyl) ribonucleotide
  misc_feature 6..15: note = DNA
  modified_base 16..20: mod_base = OTHER; note = 2'-O-(2-methoxyethyl) ribonucleotide
  modified_base 2: mod_base = OTHER; note = 5-methyl cytidine
  modified_base 5..6: mod_base = OTHER; note = 5-methyl cytidine
  modified_base 8: mod_base = OTHER; note = 5-methyl cytidine
  modified_base 15: mod_base = OTHER; note = 5-methyl cytidine
acttcctcttgttgcgggtg

SEQ ID NO: 1314 - RNA, 20 nt, synthetic construct
  source 1..20: mol_type = other RNA
  modified_base 1..20: mod_base = OTHER; note = Phosphorothioate linkage
  modified_base 1..5: mod_base = OTHER; note = 2'-O-(2-methoxyethyl) ribonucleotide
  misc_feature 6..15: note = DNA
  modified_base 16..20: mod_base = OTHER; note = 2'-O-(2-methoxyethyl) ribonucleotide
  modified_base 1: mod_base = OTHER; note = 5-methyl cytidine
  modified_base 5: mod_base = OTHER; note = 5-methyl cytidine
  modified_base 8..9: mod_base = OTHER; note = 5-methyl cytidine
  modified_base 11: mod_base = OTHER; note = 5-methyl cytidine
  modified_base 18: mod_base = OTHER; note = 5-methyl cytidine
cttacttcctcttgttgcgg

SEQ ID NO: 1315 - RNA, 20 nt, synthetic construct
  source 1..20: mol_type = other RNA
  modified_base 1..20: mod_base = OTHER; note = Phosphorothioate linkage
  modified_base 1..5: mod_base = OTHER; note = 2'-O-(2-methoxyethyl) ribonucleotide
  misc_feature 6..15: note = DNA
  modified_base 16..20: mod_base = OTHER; note = 2'-O-(2-methoxyethyl) ribonucleotide
  modified_base 3: mod_base = OTHER; note = 5-methyl cytidine
  modified_base 13: mod_base = OTHER; note = 5-methyl cytidine
ggcgagaggaagcagggagg

SEQ ID NO: 1316 - RNA, 20 nt, synthetic construct
  source 1..20: mol_type = other RNA
  modified_base 1..20: mod_base = OTHER; note = Phosphorothioate linkage
  modified_base 1..5: mod_base = OTHER; note = 2'-O-(2-methoxyethyl) ribonucleotide
  misc_feature 6..15: note = DNA
  modified_base 16..20: mod_base = OTHER; note = 2'-O-(2-methoxyethyl) ribonucleotide
  modified_base 1..2: mod_base = OTHER; note = 5-methyl cytidine
cctagaaatggggtgtgggg

SEQ ID NO: 1317 - RNA, 20 nt, synthetic construct
  source 1..20: mol_type = other RNA
  modified_base 1..20: mod_base = OTHER; note = Phosphorothioate linkage
  modified_base 1..5: mod_base = OTHER; note = 2'-O-(2-methoxyethyl) ribonucleotide
  misc_feature 6..15: note = DNA
  modified_base 16..20: mod_base = OTHER; note = 2'-O-(2-methoxyethyl) ribonucleotide
  modified_base 1..2: mod_base = OTHER; note = 5-methyl cytidine
acatgatccctagaaatggg

SEQ ID NO: 1318 - RNA, 20 nt, synthetic construct
  source 1..20: mol_type = other RNA
  modified_base 1..20: mod_base = OTHER; note = Phosphorothioate linkage
  modified_base 1..5: mod_base = OTHER; note = 2'-O-(2-methoxyethyl) ribonucleotide
  misc_feature 6..15: note = DNA
  modified_base 16..20: mod_base = OTHER; note = 2'-O-(2-methoxyethyl) ribonucleotide
  modified_base 1: mod_base = OTHER; note = 5-methyl cytidine
  modified_base 5: mod_base = OTHER; note = 5-methyl cytidine
  modified_base 7: mod_base = OTHER; note = 5-methyl cytidine
  modified_base 13..15: mod_base = OTHER; note = 5-methyl cytidine
caatcacatgatccctagaa

SEQ ID NO: 1319 - RNA, 20 nt, synthetic construct
  source 1..20: mol_type = other RNA
  modified_base 1..20: mod_base = OTHER; note = Phosphorothioate linkage
  modified_base 1..5: mod_base = OTHER; note = 2'-O-(2-methoxyethyl) ribonucleotide
  misc_feature 6..15: note = DNA
  modified_base 16..20: mod_base = OTHER; note = 2'-O-(2-methoxyethyl) ribonucleotide
  modified_base 2: mod_base = OTHER; note = 5-methyl cytidine
  modified_base 4..5: mod_base = OTHER; note = 5-methyl cytidine
  modified_base 9: mod_base = OTHER; note = 5-methyl cytidine
  modified_base 11: mod_base = OTHER; note = 5-methyl cytidine
  modified_base 17..19: mod_base = OTHER; note = 5-methyl cytidine
tctccaatcacatgatccct

SEQ ID NO: 1320 - RNA, 20 nt, synthetic construct
  source 1..20: mol_type = other RNA
  modified_base 1..20: mod_base = OTHER; note = Phosphorothioate linkage
  modified_base 1..5: mod_base = OTHER; note = 2'-O-(2-methoxyethyl) ribonucleotide
  misc_feature 6..15: note = DNA
  modified_base 16..20: mod_base = OTHER; note = 2'-O-(2-methoxyethyl) ribonucleotide
  modified_base 4: mod_base = OTHER; note = 5-methyl cytidine
  modified_base 6..7: mod_base = OTHER; note = 5-methyl cytidine
  modified_base 11: mod_base = OTHER; note = 5-methyl cytidine
  modified_base 13: mod_base = OTHER; note = 5-methyl cytidine
  modified_base 19..20: mod_base = OTHER; note = 5-methyl cytidine
attctccaatcacatgatcc

SEQ ID NO: 1321 - RNA, 20 nt, synthetic construct
  source 1..20: mol_type = other RNA
  modified_base 1..20: mod_base = OTHER; note = Phosphorothioate linkage
  modified_base 1..5: mod_base = OTHER; note = 2'-O-(2-methoxyethyl) ribonucleotide
  misc_feature 6..15: note = DNA
  modified_base 16..20: mod_base = OTHER; note = 2'-O-(2-methoxyethyl) ribonucleotide
  modified_base 6: mod_base = OTHER; note = 5-methyl cytidine
  modified_base 8..9: mod_base = OTHER; note = 5-methyl cytidine
  modified_base 13: mod_base = OTHER; note = 5-methyl cytidine
  modified_base 15: mod_base = OTHER; note = 5-methyl cytidine
tgattctccaatcacatgat

SEQ ID NO: 1322 - RNA, 20 nt, synthetic construct
  source 1..20: mol_type = other RNA
  modified_base 1..20: mod_base = OTHER; note = Phosphorothioate linkage
  modified_base 1..5: mod_base = OTHER; note = 2'-O-(2-methoxyethyl) ribonucleotide
  misc_feature 6..15: note = DNA
  modified_base 16..20: mod_base = OTHER; note = 2'-O-(2-methoxyethyl) ribonucleotide
  modified_base 1: mod_base = OTHER; note = 5-methyl cytidine
  modified_base 8: mod_base = OTHER; note = 5-methyl cytidine
  modified_base 10..11: mod_base = OTHER; note = 5-methyl cytidine
  modified_base 15: mod_base = OTHER; note = 5-methyl cytidine
  modified_base 17: mod_base = OTHER; note = 5-methyl cytidine
catgattctccaatcacatg

SEQ ID NO: 1323 - RNA, 20 nt, synthetic construct
  source 1..20: mol_type = other RNA
  modified_base 1..20: mod_base = OTHER; note = Phosphorothioate linkage
  modified_base 1..5: mod_base = OTHER; note = 2'-O-(2-methoxyethyl) ribonucleotide
  misc_feature 6..15: note = DNA
  modified_base 16..20: mod_base = OTHER; note = 2'-O-(2-methoxyethyl) ribonucleotide
  modified_base 1: mod_base = OTHER; note = 5-methyl cytidine
  modified_base 3: mod_base = OTHER; note = 5-methyl cytidine
  modified_base 10: mod_base = OTHER; note = 5-methyl cytidine
  modified_base 12..13: mod_base = OTHER; note = 5-methyl cytidine
  modified_base 17: mod_base = OTHER; note = 5-methyl cytidine
  modified_base 19: mod_base = OTHER; note = 5-methyl cytidine
cacatgattctccaatcaca

SEQ ID NO: 1324 - RNA, 20 nt, synthetic construct
  source 1..20: mol_type = other RNA
  modified_base 1..20: mod_base = OTHER; note = Phosphorothioate linkage
  modified_base 1..20: mod_base = OTHER; note = 2'-O-(2-methoxyethyl) ribonucleotide
  modified_base 1: mod_base = OTHER; note = 5-methyl cytidine
  modified_base 3..5: mod_base = OTHER; note = 5-methyl cytidine
  modified_base 8..9: mod_base = OTHER; note = 5-methyl cytidine
  modified_base 11: mod_base = OTHER; note = 5-methyl cytidine
  modified_base 17..18: mod_base = OTHER; note = 5-methyl cytidine
ctcccagccactttttcctg

SEQ ID NO: 1325 - RNA, 20 nt, synthetic construct
  source 1..20: mol_type = other RNA
  modified_base 1..20: mod_base = OTHER; note = Phosphorothioate linkage
  modified_base 1..20: mod_base = OTHER; note = 2'-O-(2-methoxyethyl) ribonucleotide
  modified_base 1: mod_base = OTHER; note = 5-methyl cytidine
  modified_base 3: mod_base = OTHER; note = 5-methyl cytidine
  modified_base 5..7: mod_base = OTHER; note = 5-methyl cytidine
  modified_base 10..11: mod_base = OTHER; note = 5-methyl cytidine
  modified_base 13: mod_base = OTHER; note = 5-methyl cytidine
  modified_base 19..20: mod_base = OTHER; note = 5-methyl cytidine
ctctcccagccactttttcc

SEQ ID NO: 1326 - RNA, 20 nt, synthetic construct
  source 1..20: mol_type = other RNA
  modified_base 1..20: mod_base = OTHER; note = Phosphorothioate linkage
  modified_base 1..20: mod_base = OTHER; note = 2'-O-(2-methoxyethyl) ribonucleotide
  modified_base 1: mod_base = OTHER; note = 5-methyl cytidine
  modified_base 3..4: mod_base = OTHER; note = 5-methyl cytidine
  modified_base 6: mod_base = OTHER; note = 5-methyl cytidine
  modified_base 8..10: mod_base = OTHER; note = 5-methyl cytidine
  modified_base 13..14: mod_base = OTHER; note = 5-methyl cytidine
  modified_base 16: mod_base = OTHER; note = 5-methyl cytidine
cgcctctcccagccactttt

SEQ ID NO: 1327 - RNA, 20 nt, synthetic construct
  source 1..20: mol_type = other RNA
  modified_base 1..20: mod_base = OTHER; note = Phosphorothioate linkage
  modified_base 1..20: mod_base = OTHER; note = 2'-O-(2-methoxyethyl) ribonucleotide
  modified_base 4: mod_base = OTHER; note = 5-methyl cytidine
  modified_base 7..8: mod_base = OTHER; note = 5-methyl cytidine
  modified_base 10..11: mod_base = OTHER; note = 5-methyl cytidine
  modified_base 13: mod_base = OTHER; note = 5-methyl cytidine
  modified_base 15..17: mod_base = OTHER; note = 5-methyl cytidine
  modified_base 20: mod_base = OTHER; note = 5-methyl cytidine
tagcttccgcctctcccagc

SEQ ID NO: 1328 - RNA, 20 nt, synthetic construct
  source 1..20: mol_type = other RNA
  modified_base 1..20: mod_base = OTHER; note = Phosphorothioate linkage
  modified_base 1..20: mod_base = OTHER; note = 2'-O-(2-methoxyethyl) ribonucleotide
  modified_base 2: mod_base = OTHER; note = 5-methyl cytidine
  modified_base 6: mod_base = OTHER; note = 5-methyl cytidine
  modified_base 9..10: mod_base = OTHER; note = 5-methyl cytidine
  modified_base 12..13: mod_base = OTHER; note = 5-methyl cytidine
  modified_base 15: mod_base = OTHER; note = 5-methyl cytidine
  modified_base 17..19: mod_base = OTHER; note = 5-methyl cytidine
gctagcttccgcctctccca

SEQ ID NO: 1329 - RNA, 20 nt, synthetic construct
  source 1..20: mol_type = other RNA
  modified_base 1..20: mod_base = OTHER; note = Phosphorothioate linkage
  modified_base 1..20: mod_base = OTHER; note = 2'-O-(2-methoxyethyl) ribonucleotide
  modified_base 3: mod_base = OTHER; note = 5-methyl cytidine
  modified_base 7: mod_base = OTHER; note = 5-methyl cytidine
  modified_base 10..11: mod_base = OTHER; note = 5-methyl cytidine
  modified_base 13..14: mod_base = OTHER; note = 5-methyl cytidine
  modified_base 16: mod_base = OTHER; note = 5-methyl cytidine
  modified_base 18..20: mod_base = OTHER; note = 5-methyl cytidine
agctagcttccgcctctccc

SEQ ID NO: 1330 - RNA, 20 nt, synthetic construct
  source 1..20: mol_type = other RNA
  modified_base 1..20: mod_base = OTHER; note = Phosphorothioate linkage
  modified_base 1..20: mod_base = OTHER; note = 2'-O-(2-methoxyethyl) ribonucleotide
  modified_base 1: mod_base = OTHER; note = 5-methyl cytidine
  modified_base 5: mod_base = OTHER; note = 5-methyl cytidine
  modified_base 9: mod_base = OTHER; note = 5-methyl cytidine
  modified_base 12..13: mod_base = OTHER; note = 5-methyl cytidine
  modified_base 15..16: mod_base = OTHER; note = 5-methyl cytidine
  modified_base 18: mod_base = OTHER; note = 5-methyl cytidine
  modified_base 20: mod_base = OTHER; note = 5-methyl cytidine
cgagctagcttccgcctctc

SEQ ID NO: 1331 - RNA, 20 nt, synthetic construct
  source 1..20: mol_type = other RNA
  modified_base 1..20: mod_base = OTHER; note = Phosphorothioate linkage
  modified_base 1..20: mod_base = OTHER; note = 2'-O-(2-methoxyethyl) ribonucleotide
  modified_base 3: mod_base = OTHER; note = 5-methyl cytidine
  modified_base 7: mod_base = OTHER; note = 5-methyl cytidine
  modified_base 11: mod_base = OTHER; note = 5-methyl cytidine
  modified_base 14..15: mod_base = OTHER; note = 5-methyl cytidine
  modified_base 17..18: mod_base = OTHER; note = 5-methyl cytidine
  modified_base 20: mod_base = OTHER; note = 5-methyl cytidine
gacgagctagcttccgcctc

SEQ ID NO: 1332 - RNA, 20 nt, synthetic construct
  source 1..20: mol_type = other RNA
  modified_base 1..20: mod_base = OTHER; note = Phosphorothioate linkage
  modified_base 1..20: mod_base = OTHER; note = 2'-O-(2-methoxyethyl) ribonucleotide
  modified_base 4: mod_base = OTHER; note = 5-methyl cytidine
  modified_base 8: mod_base = OTHER; note = 5-methyl cytidine
  modified_base 12: mod_base = OTHER; note = 5-methyl cytidine
  modified_base 15..16: mod_base = OTHER; note = 5-methyl cytidine
  modified_base 18..19: mod_base = OTHER; note = 5-methyl cytidine
ggacgagctagcttccgcct

SEQ ID NO: 1333 - RNA, 20 nt, synthetic construct
  source 1..20: mol_type = other RNA
  modified_base 1..20: mod_base = OTHER; note = Phosphorothioate linkage
  modified_base 1..20: mod_base = OTHER; note = 2'-O-(2-methoxyethyl) ribonucleotide
  modified_base 7: mod_base = OTHER; note = 5-methyl cytidine
  modified_base 11: mod_base = OTHER; note = 5-methyl cytidine
  modified_base 15: mod_base = OTHER; note = 5-methyl cytidine
  modified_base 18..19: mod_base = OTHER; note = 5-methyl cytidine
gtgggacgagctagcttccg

SEQ ID NO: 1334 - RNA, 20 nt, synthetic construct
  source 1..20: mol_type = other RNA
  modified_base 1..20: mod_base = OTHER; note = Phosphorothioate linkage
  modified_base 1..20: mod_base = OTHER; note = 2'-O-(2-methoxyethyl) ribonucleotide
  modified_base 9: mod_base = OTHER; note = 5-methyl cytidine
  modified_base 13: mod_base = OTHER; note = 5-methyl cytidine
  modified_base 17: mod_base = OTHER; note = 5-methyl cytidine
  modified_base 20: mod_base = OTHER; note = 5-methyl cytidine
gggtgggacgagctagcttc

SEQ ID NO: 1335 - RNA, 20 nt, synthetic construct
  source 1..20: mol_type = other RNA
  modified_base 1..20: mod_base = OTHER; note = Phosphorothioate linkage
  modified_base 1..20: mod_base = OTHER; note = 2'-O-(2-methoxyethyl) ribonucleotide
  modified_base 2: mod_base = OTHER; note = 5-methyl cytidine
  modified_base 11: mod_base = OTHER; note = 5-methyl cytidine
  modified_base 15: mod_base = OTHER; note = 5-methyl cytidine
  modified_base 19: mod_base = OTHER; note = 5-methyl cytidine
gcgggtgggacgagctagct

SEQ ID NO: 1336 - RNA, 20 nt, synthetic construct
  source 1..20: mol_type = other RNA
  modified_base 1..20: mod_base = OTHER; note = Phosphorothioate linkage
  modified_base 1..20: mod_base = OTHER; note = 2'-O-(2-methoxyethyl) ribonucleotide
  modified_base 5: mod_base = OTHER; note = 5-methyl cytidine
  modified_base 14: mod_base = OTHER; note = 5-methyl cytidine
  modified_base 18: mod_base = OTHER; note = 5-methyl cytidine
gttgcgggtgggacgagcta

SEQ ID NO: 1337 - RNA, 20 nt, synthetic construct
  source 1..20: mol_type = other RNA
  modified_base 1..20: mod_base = OTHER; note = Phosphorothioate linkage
  modified_base 1..20: mod_base = OTHER; note = 2'-O-(2-methoxyethyl) ribonucleotide
  modified_base 7: mod_base = OTHER; note = 5-methyl cytidine
  modified_base 16: mod_base = OTHER; note = 5-methyl cytidine
  modified_base 20: mod_base = OTHER; note = 5-methyl cytidine
ttgttgcgggtgggacgagc

SEQ ID NO: 1338 - RNA, 20 nt, synthetic construct
  source 1..20: mol_type = other RNA
  modified_base 1..20: mod_base = OTHER; note = Phosphorothioate linkage
  modified_base 1..20: mod_base = OTHER; note = 2'-O-(2-methoxyethyl) ribonucleotide
  modified_base 1: mod_base = OTHER; note = 5-methyl cytidine
  modified_base 3: mod_base = OTHER; note = 5-methyl cytidine
  modified_base 10: mod_base = OTHER; note = 5-methyl cytidine
  modified_base 19: mod_base = OTHER; note = 5-methyl cytidine
ctcttgttgcgggtgggacg

SEQ ID NO: 1339 - RNA, 20 nt, synthetic construct
  source 1..20: mol_type = other RNA
  modified_base 1..20: mod_base = OTHER; note = Phosphorothioate linkage
  modified_base 1..20: mod_base = OTHER; note = 2'-O-(2-methoxyethyl) ribonucleotide
  modified_base 2..3: mod_base = OTHER; note = 5-methyl cytidine
  modified_base 5: mod_base = OTHER; note = 5-methyl cytidine
  modified_base 12: mod_base = OTHER; note = 5-methyl cytidine
tcctcttgttgcgggtggga

SEQ ID NO: 1340 - RNA, 20 nt, synthetic construct
  source 1..20: mol_type = other RNA
  modified_base 1..20: mod_base = OTHER; note = Phosphorothioate linkage
  modified_base 1..20: mod_base = OTHER; note = 2'-O-(2-methoxyethyl) ribonucleotide
  modified_base 2: mod_base = OTHER; note = 5-methyl cytidine
  modified_base 5..6: mod_base = OTHER; note = 5-methyl cytidine
  modified_base 8: mod_base = OTHER; note = 5-methyl cytidine
  modified_base 15: mod_base = OTHER; note = 5-methyl cytidine
acttcctcttgttgcgggtg

SEQ ID NO: 1341 - RNA, 20 nt, synthetic construct
  source 1..20: mol_type = other RNA
  modified_base 1..20: mod_base = OTHER; note = Phosphorothioate linkage
  modified_base 1..20: mod_base = OTHER; note = 2'-O-(2-methoxyethyl) ribonucleotide
  modified_base 1: mod_base = OTHER; note = 5-methyl cytidine
  modified_base 6: mod_base = OTHER; note = 5-methyl cytidine
  modified_base 9..10: mod_base = OTHER; note = 5-methyl cytidine
  modified_base 12: mod_base = OTHER; note = 5-methyl cytidine
  modified_base 19: mod_base = OTHER; note = 5-methyl cytidine
cttacttcctcttgttgcgg

SEQ ID NO: 1342 - RNA, 20 nt, synthetic construct
  source 1..20: mol_type = other RNA
  modified_base 1..20: mod_base = OTHER; note = Phosphorothioate linkage
  modified_base 1..20: mod_base = OTHER; note = 2'-O-(2-methoxyethyl) ribonucleotide
  modified_base 3: mod_base = OTHER; note = 5-methyl cytidine
  modified_base 13: mod_base = OTHER; note = 5-methyl cytidine
ggcgagaggaagcagggagg

SEQ ID NO: 1343 - RNA, 20 nt, synthetic construct
  source 1..20: mol_type = other RNA
  modified_base 1..20: mod_base = OTHER; note = Phosphorothioate linkage
  modified_base 1..20: mod_base = OTHER; note = 2'-O-(2-methoxyethyl) ribonucleotide
  modified_base 1..2: mod_base = OTHER; note = 5-methyl cytidine
cctagaaatggggtgtgggg

SEQ ID NO: 1344 - RNA, 20 nt, synthetic construct
  source 1..20: mol_type = other RNA
  modified_base 1..20: mod_base = OTHER; note = Phosphorothioate linkage
  modified_base 1..20: mod_base = OTHER; note = 2'-O-(2-methoxyethyl) ribonucleotide
  modified_base 2: mod_base = OTHER; note = 5-methyl cytidine
  modified_base 8..10: mod_base = OTHER; note = 5-methyl cytidine
acatgatccctagaaatggg

SEQ ID NO: 1345 - RNA, 20 nt, synthetic construct
  source 1..20: mol_type = other RNA
  modified_base 1..20: mod_base = OTHER; note = Phosphorothioate linkage
  modified_base 1..20: mod_base = OTHER; note = 2'-O-(2-methoxyethyl) ribonucleotide
  modified_base 1: mod_base = OTHER; note = 5-methyl cytidine
  modified_base 5: mod_base = OTHER; note = 5-methyl cytidine
  modified_base 7: mod_base = OTHER; note = 5-methyl cytidine
  modified_base 13..15: mod_base = OTHER; note = 5-methyl cytidine
caatcacatgatccctagaa

SEQ ID NO: 1346 - RNA, 20 nt, synthetic construct
  source 1..20: mol_type = other RNA
  modified_base 1..20: mod_base = OTHER; note = Phosphorothioate linkage
  modified_base 1..20: mod_base = OTHER; note = 2'-O-(2-methoxyethyl) ribonucleotide
  modified_base 2: mod_base = OTHER; note = 5-methyl cytidine
  modified_base 2..5: mod_base = OTHER; note = 5-methyl cytidine
  modified_base 9: mod_base = OTHER; note = 5-methyl cytidine
  modified_base 11: mod_base = OTHER; note = 5-methyl cytidine
  modified_base 17..19: mod_base = OTHER; note = 5-methyl cytidine
tctccaatcacatgatccct

SEQ ID NO: 1347 - RNA, 20 nt, synthetic construct
  source 1..20: mol_type = other RNA
  modified_base 1..20: mod_base = OTHER; note = Phosphorothioate linkage
  modified_base 1..20: mod_base = OTHER; note = 2'-O-(2-methoxyethyl) ribonucleotide
  modified_base 4: mod_base = OTHER; note = 5-methyl cytidine
  modified_base 6..7: mod_base = OTHER; note = 5-methyl cytidine
  modified_base 11: mod_base = OTHER; note = 5-methyl cytidine
  modified_base 13: mod_base = OTHER; note = 5-methyl cytidine
  modified_base 19..20: mod_base = OTHER; note = 5-methyl cytidine
attctccaatcacatgatcc

SEQ ID NO: 1348 - RNA, 20 nt, synthetic construct
  source 1..20: mol_type = other RNA
  modified_base 1..20: mod_base = OTHER; note = Phosphorothioate linkage
  modified_base 1..20: mod_base = OTHER; note = 2'-O-(2-methoxyethyl) ribonucleotide
  modified_base 6: mod_base = OTHER; note = 5-methyl cytidine
  modified_base 8..9: mod_base = OTHER; note = 5-methyl cytidine
  modified_base 13: mod_base = OTHER; note = 5-methyl cytidine
  modified_base 15: mod_base = OTHER; note = 5-methyl cytidine
tgattctccaatcacatgat

SEQ ID NO: 1349 - RNA, 20 nt, synthetic construct
  source 1..20: mol_type = other RNA
  modified_base 1..20: mod_base = OTHER; note = Phosphorothioate linkage
  modified_base 1..20: mod_base = OTHER; note = 2'-O-(2-methoxyethyl) ribonucleotide
  modified_base 1: mod_base = OTHER; note = 5-methyl cytidine
  modified_base 8: mod_base = OTHER; note = 5-methyl cytidine
  modified_base 10..11: mod_base = OTHER; note = 5-methyl cytidine
  modified_base 15: mod_base = OTHER; note = 5-methyl cytidine
  modified_base 17: mod_base = OTHER; note = 5-methyl cytidine
catgattctccaatcacatg

SEQ ID NO: 1350 - RNA, 20 nt, synthetic construct
  source 1..20: mol_type = other RNA
  modified_base 1..20: mod_base = OTHER; note = Phosphorothioate linkage
  modified_base 1..20: mod_base = OTHER; note = 2'-O-(2-methoxyethyl) ribonucleotide
  modified_base 1: mod_base = OTHER; note = 5-methyl cytidine
  modified_base 3: mod_base = OTHER; note = 5-methyl cytidine
  modified_base 10: mod_base = OTHER; note = 5-methyl cytidine
  modified_base 12..13: mod_base = OTHER; note = 5-methyl cytidine
  modified_base 17: mod_base = OTHER; note = 5-methyl cytidine
  modified_base 19: mod_base = OTHER; note = 5-methyl cytidine
cacatgattctccaatcaca

SEQ ID NO: 1351 - DNA, 20 bp, synthetic construct
  source 1..20: mol_type = other DNA
  modified_base 1..20: mod_base = OTHER; note = Phosphorothioate linkage
  modified_base 1..5: mod_base = OTHER; note = 2'-O-(2-methoxyethyl) ribonucleotide
  misc_feature 6..15: note = DNA
  modified_base 16..20: mod_base = OTHER; note = 2'-O-(2-methoxyethyl) ribonucleotide
  modified_base 4: mod_base = OTHER; note = 5-methyl cytidine
  modified_base 18: mod_base = OTHER; note = 5-methyl cytidine
ggacttgggagtggtgactg

SEQ ID NO: 1352 - RNA, 20 nt, synthetic construct
  source 1..20: mol_type = other RNA
  modified_base 1..20: mod_base = OTHER; note = Phosphorothioate linkage
  modified_base 1..5: mod_base = OTHER; note = 2'-O-(2-methoxyethyl) ribonucleotide
  modified_base 6: mod_base = OTHER; note = locked nucleic acid
  modified_base 7..8: mod_base = OTHER; note = 2'-O-(2-methoxyethyl) ribonucleotide
  modified_base 9: mod_base = OTHER; note = locked nucleic acid
  modified_base 10..11: mod_base = OTHER; note = 2'-O-(2-methoxyethyl) ribonucleotide
  modified_base 12: mod_base = OTHER; note = locked nucleic acid
  modified_base 13..14: mod_base = OTHER; note = 2'-O-(2-methoxyethyl) ribonucleotide
  modified_base 15: mod_base = OTHER; note = locked nucleic acid
  modified_base 16..20: mod_base = OTHER; note = 2'-O-(2-methoxyethyl) ribonucleotide
  modified_base 4: mod_base = OTHER; note = 5-methyl cytidine
  modified_base 18: mod_base = OTHER; note = 5-methyl cytidine
ggacttgggagtggtgactg

SEQ ID NO: 1353 - DNA, 20 bp, synthetic construct
  source 1..20: mol_type = other DNA
  modified_base 1..20: mod_base = OTHER; note = Phosphorothioate linkage
  modified_base 1..5: mod_base = OTHER; note = locked nucleic acid
  misc_feature 6..15: note = DNA
  modified_base 16..20: mod_base = OTHER; note = locked nucleic acid
ggacttgggagtggtgactg

SEQ ID NO: 1354 - RNA, 20 nt, synthetic construct
  source 1..20: mol_type = other RNA
  modified_base 1..20: mod_base = OTHER; note = Phosphorothioate linkage
  modified_base 1..20: mod_base = OTHER; note = 2'-O-(2-methoxyethyl) ribonucleotide
  modified_base 4: mod_base = OTHER; note = 5-methyl cytidine
  modified_base 18: mod_base = OTHER; note = 5-methyl cytidine
ggacttgggagtggtgactg

SEQ ID NO: 1355 - RNA, 20 nt, synthetic construct
  source 1..20: mol_type = other RNA
  modified_base 1..10: mod_base = OTHER; note = Phosphorothioate linkage
  modified_base 11..20: mod_base = OTHER; note = Phosphorothioate linkage
  modified_base 1..20: mod_base = OTHER; note = 2'-O-(2-methoxyethyl) ribonucleotide
  modified_base 4: mod_base = OTHER; note = 5-methyl cytidine
  modified_base 18: mod_base = OTHER; note = 5-methyl cytidine
ggacttgggagtggtgactg

SEQ ID NO: 1356 - RNA, 20 nt, synthetic construct
  source 1..20: mol_type = other RNA
  modified_base 1..5: mod_base = OTHER; note = Phosphorothioate linkage
  modified_base 6..10: mod_base = OTHER; note = Phosphorothioate linkage
  modified_base 11..15: mod_base = OTHER; note = Phosphorothioate linkage
  modified_base 16..20: mod_base = OTHER; note = Phosphorothioate linkage
  modified_base 1..20: mod_base = OTHER; note = 2'-O-(2-methoxyethyl) ribonucleotide
  modified_base 4: mod_base = OTHER; note = 5-methyl cytidine
  modified_base 18: mod_base = OTHER; note = 5-methyl cytidine
ggacttgggagtggtgactg

SEQ ID NO: 1357 - RNA, 20 nt, synthetic construct
  source 1..20: mol_type = other RNA
  modified_base 1..2: mod_base = OTHER; note = Phosphorothioate linkage
  modified_base 3..4: mod_base = OTHER; note = Phosphorothioate linkage
  modified_base 5..6: mod_base = OTHER; note = Phosphorothioate linkage
  modified_base 7..8: mod_base = OTHER; note = Phosphorothioate linkage
  modified_base 9..10: mod_base = OTHER; note = Phosphorothioate linkage
  modified_base 11..12: mod_base = OTHER; note = Phosphorothioate linkage
  modified_base 13..14: mod_base = OTHER; note = Phosphorothioate linkage
  modified_base 15..16: mod_base = OTHER; note = Phosphorothioate linkage
  modified_base 17..18: mod_base = OTHER; note = Phosphorothioate linkage
  modified_base 19..20: mod_base = OTHER; note = Phosphorothioate linkage
  modified_base 1..20: mod_base = OTHER; note = 2'-O-(2-methoxyethyl) ribonucleotide
  modified_base 4: mod_base = OTHER; note = 5-methyl cytidine
  modified_base 18: mod_base = OTHER; note = 5-methyl cytidine
ggacttgggagtggtgactg

SEQ ID NO: 1358 - RNA, 20 nt, synthetic construct
  source 1..20: mol_type = other RNA
  modified_base 5..6: mod_base = OTHER; note = Phosphorothioate linkage
  modified_base 10..11: mod_base = OTHER; note = Phosphorothioate linkage
  modified_base 15..16: mod_base = OTHER; note = Phosphorothioate linkage
  modified_base 1..20: mod_base = OTHER; note = 2'-O-(2-methoxyethyl) ribonucleotide
  modified_base 4: mod_base = OTHER; note = 5-methyl cytidine
  modified_base 18: mod_base = OTHER; note = 5-methyl cytidine
ggacttgggagtggtgactg

SEQ ID NO: 1359 - RNA, 20 nt, synthetic construct
  source 1..20: mol_type = other RNA
  modified_base 10..11: mod_base = OTHER; note = Phosphorothioate linkage
  modified_base 1..20: mod_base = OTHER; note = 2'-O-(2-methoxyethyl) ribonucleotide
  modified_base 4: mod_base = OTHER; note = 5-methyl cytidine
  modified_base 18: mod_base = OTHER; note = 5-methyl cytidine
ggacttgggagtggtgactg

SEQ ID NO: 1360 - DNA, 20 bp, synthetic construct
  source 1..20: mol_type = other DNA
  modified_base 1..10: mod_base = OTHER; note = Phosphorothioate linkage
  modified_base 11..20: mod_base = OTHER; note = Phosphorothioate linkage
  modified_base 1..5: mod_base = OTHER; note = 2'-O-(2-methoxyethyl) ribonucleotide
  misc_feature 6..15: note = DNA
  modified_base 16..20: mod_base = OTHER; note = 2'-O-(2-methoxyethyl) ribonucleotide
  modified_base 4: mod_base = OTHER; note = 5-methyl cytidine
  modified_base 18: mod_base = OTHER; note = 5-methyl cytidine
ggacttgggagtggtgactg

SEQ ID NO: 1361 - DNA, 20 bp, synthetic construct
  source 1..20: mol_type = other DNA
  modified_base 1..5: mod_base = OTHER; note = Phosphorothioate linkage
  modified_base 6..10: mod_base = OTHER; note = Phosphorothioate linkage
  modified_base 11..15: mod_base = OTHER; note = Phosphorothioate linkage
  modified_base 16..20: mod_base = OTHER; note = Phosphorothioate linkage
  modified_base 1..5: mod_base = OTHER; note = 2'-O-(2-methoxyethyl) ribonucleotide
  misc_feature 6..15: note = DNA
  modified_base 16..20: mod_base = OTHER; note = 2'-O-(2-methoxyethyl) ribonucleotide
  modified_base 4: mod_base = OTHER; note = 5-methyl cytidine
  modified_base 18: mod_base = OTHER; note = 5-methyl cytidine
ggacttgggagtggtgactg

SEQ ID NO: 1362 - RNA, 20 nt, synthetic construct
  source 1..20: mol_type = other RNA
  modified_base 3..4: mod_base = OTHER; note = Phosphorothioate linkage
  modified_base 5..6: mod_base = OTHER; note = Phosphorothioate linkage
  modified_base 7..8: mod_base = OTHER; note = Phosphorothioate linkage
  modified_base 9..10: mod_base = OTHER; note = Phosphorothioate linkage
  modified_base 11..12: mod_base = OTHER; note = Phosphorothioate linkage
  modified_base 13..14: mod_base = OTHER; note = Phosphorothioate linkage
  modified_base 15..16: mod_base = OTHER; note = Phosphorothioate linkage
  modified_base 17..18: mod_base = OTHER; note = Phosphorothioate linkage
  modified_base 19..20: mod_base = OTHER; note = Phosphorothioate linkage
  modified_base 1..5: mod_base = OTHER; note = 2'-O-(2-methoxyethyl) ribonucleotide
  misc_feature 6..15: note = DNA
  modified_base 16..20: mod_base = OTHER; note = 2'-O-(2-methoxyethyl) ribonucleotide
  modified_base 4: mod_base = OTHER; note = 5-methyl cytidine
  modified_base 18: mod_base = OTHER; note = 5-methyl cytidine
ggacttgggagtggtgactg

SEQ ID NO: 1363 - DNA, 20 bp, synthetic construct
  source 1..20: mol_type = other DNA
  modified_base 5..6: mod_base = OTHER; note = Phosphorothioate linkage
  modified_base 10..11: mod_base = OTHER; note = Phosphorothioate linkage
  modified_base 15..16: mod_base = OTHER; note = Phosphorothioate linkage
  modified_base 1..5: mod_base = OTHER; note = 2'-O-(2-methoxyethyl) ribonucleotide
  misc_feature 6..15: note = DNA
  modified_base 16..20: mod_base = OTHER; note = 2'-O-(2-methoxyethyl) ribonucleotide
  modified_base 4: mod_base = OTHER; note = 5-methyl cytidine
  modified_base 18: mod_base = OTHER; note = 5-methyl cytidine
ggacttgggagtggtgactg

SEQ ID NO: 1364 - DNA, 20 bp, synthetic construct
  source 1..20: mol_type = other DNA
  modified_base 10..11: mod_base = OTHER; note = Phosphorothioate linkage
  modified_base 1..5: mod_base = OTHER; note = 2'-O-(2-methoxyethyl) ribonucleotide
  misc_feature 6..15: note = DNA
  modified_base 16..20: mod_base = OTHER; note = 2'-O-(2-methoxyethyl) ribonucleotide
  modified_base 4: mod_base = OTHER; note = 5-methyl cytidine
  modified_base 18: mod_base = OTHER; note = 5-methyl cytidine
ggacttgggagtggtgactg

SEQ ID NO: 1365 - DNA, 20 bp, synthetic construct
  source 1..20: mol_type = other DNA
  modified_base 1..20: mod_base = OTHER; note = Phosphorothioate linkage
  misc_feature 1..20: note = DNA
  modified_base 4: mod_base = OTHER; note = 5-methyl cytidine
  modified_base 18: mod_base = OTHER; note = 5-methyl cytidine
ggacttgggagtggtgactg

SEQ ID NO: 1366 - DNA, 20 bp, synthetic construct
  source 1..20: mol_type = other DNA
  misc_feature 1..20: note = DNA
  modified_base 4: mod_base = OTHER; note = 5-methyl cytidine
  modified_base 18: mod_base = OTHER; note = 5-methyl cytidine
ggacttgggagtggtgactg

SEQ ID NO: 1367 - RNA, 19 nt, synthetic construct
  source 1..19: mol_type = other RNA
  modified_base 1..19: mod_base = OTHER; note = Phosphorothioate linkage
  modified_base 1..5: mod_base = OTHER; note = 2'-O-(2-methoxyethyl) ribonucleotide
  modified_base 6: mod_base = OTHER; note = Locked nucleic acid
  modified_base 7..8: mod_base = OTHER; note = 2'-O-(2-methoxyethyl) ribonucleotide
  modified_base 9: mod_base = OTHER; note = Locked nucleic acid
  modified_base 10..11: mod_base = OTHER; note = 2'-O-(2-methoxyethyl) ribonucleotide
  modified_base 12: mod_base = OTHER; note = Locked nucleic acid
  modified_base 13..14: mod_base = OTHER; note = 2'-O-(2-methoxyethyl) ribonucleotide
  modified_base 15: mod_base = OTHER; note = Locked nucleic acid
  modified_base 16..19: mod_base = OTHER; note = 2'-O-(2-methoxyethyl) ribonucleotide
  modified_base 4: mod_base = OTHER; note = 5-methyl cytidine
  modified_base 18: mod_base = OTHER; note = 5-methyl cytidine
ggacttgggagtggtgact

SEQ ID NO: 1368 - RNA, 18 nt, synthetic construct
  source 1..18: mol_type = other RNA
  modified_base 1..18: mod_base = OTHER; note = Phosphorothioate linkage
  modified_base 1..5: mod_base = OTHER; note = 2'-O-(2-methoxyethyl) ribonucleotide
  modified_base 6: mod_base = OTHER; note = Locked nucleic acid
  modified_base 7..8: mod_base = OTHER; note = 2'-O-(2-methoxyethyl) ribonucleotide
  modified_base 9: mod_base = OTHER; note = Locked nucleic acid
  modified_base 10..11: mod_base = OTHER; note = 2'-O-(2-methoxyethyl) ribonucleotide
  modified_base 12: mod_base = OTHER; note = Locked nucleic acid
  modified_base 13..14: mod_base = OTHER; note = 2'-O-(2-methoxyethyl) ribonucleotide
  modified_base 15: mod_base = OTHER; note = Locked nucleic acid
  modified_base 16..18: mod_base = OTHER; note = 2'-O-(2-methoxyethyl) ribonucleotide
  modified_base 4: mod_base = OTHER; note = 5-methyl cytidine
  modified_base 18: mod_base = OTHER; note = 5-methyl cytidine
ggacttgggagtggtgac

SEQ ID NO: 1369 - RNA, 20 nt, synthetic construct
  source 1..20: mol_type = other RNA
cctagtggaagataacggag

SEQ ID NO: 1370 - RNA, 20 nt, synthetic construct
  source 1..20: mol_type = other RNA
acctagtggaagataacgga

SEQ ID NO: 1371 - RNA, 20 nt, synthetic construct
  source 1..20: mol_type = other RNA
cacctagtggaagataacgg

SEQ ID NO: 1372 - RNA, 20 nt, synthetic construct
  source 1..20: mol_type = other RNA
ccacctagtggaagataacg

SEQ ID NO: 1373 - RNA, 20 nt, synthetic construct
  source 1..20: mol_type = other RNA
gccacctagtggaagataac

SEQ ID NO: 1374 - RNA, 20 nt, synthetic construct
  source 1..20: mol_type = other RNA
tgccacctagtggaagataa

SEQ ID NO: 1375 - RNA, 20 nt, synthetic construct
  source 1..20: mol_type = other RNA
gtgccacctagtggaagata

SEQ ID NO: 1376 - RNA, 20 nt, synthetic construct
  source 1..20: mol_type = other RNA
ggtgccacctagtggaagat

SEQ ID NO: 1377 - RNA, 20 nt, synthetic construct
  source 1..20: mol_type = other RNA
gggtgccacctagtggaaga

SEQ ID NO: 1378 - RNA, 20 nt, synthetic construct
  source 1..20: mol_type = other RNA
ggggtgccacctagtggaag

SEQ ID NO: 1379 - RNA, 20 nt, synthetic construct
  source 1..20: mol_type = other RNA
gggggtgccacctagtggaa

SEQ ID NO: 1380 - RNA, 20 nt, synthetic construct
  source 1..20: mol_type = other RNA
ggggggtgccacctagtgga

SEQ ID NO: 1381 - RNA, 20 nt, synthetic construct
  source 1..20: mol_type = other RNA
tggggggtgccacctagtgg

SEQ ID NO: 1382 - RNA, 20 nt, synthetic construct
  source 1..20: mol_type = other RNA
ttggggggtgccacctagtg

SEQ ID NO: 1383 - RNA, 20 nt, synthetic construct
  source 1..20: mol_type = other RNA
gttggggggtgccacctagt

SEQ ID NO: 1384 - RNA, 20 nt, synthetic construct
  source 1..20: mol_type = other RNA
agttggggggtgccacctag

SEQ ID NO: 1385 - RNA, 20 nt, synthetic construct
  source 1..20: mol_type = other RNA
gagttggggggtgccaccta

SEQ ID NO: 1386 - RNA, 20 nt, synthetic construct
  source 1..20: mol_type = other RNA
ggagttggggggtgccacct

SEQ ID NO: 1387 - RNA, 20 nt, synthetic construct
  source 1..20: mol_type = other RNA
cggagttggggggtgccacc

SEQ ID NO: 1388 - RNA, 20 nt, synthetic construct
  source 1..20: mol_type = other RNA
tcggagttggggggtgccac

SEQ ID NO: 1389 - RNA, 20 nt, synthetic construct
  source 1..20: mol_type = other RNA
ctcggagttggggggtgcca

SEQ ID NO: 1390 - RNA, 20 nt, synthetic construct
  source 1..20: mol_type = other RNA
actcggagttggggggtgcc

SEQ ID NO: 1391 - RNA, 20 nt, synthetic construct
  source 1..20: mol_type = other RNA
cactcggagttggggggtgc

SEQ ID NO: 1392 - RNA, 20 nt, synthetic construct
  source 1..20: mol_type = other RNA
gcactcggagttggggggtg

SEQ ID NO: 1393 - RNA, 20 nt, synthetic construct
  source 1..20: mol_type = other RNA
ggcactcggagttggggggt

SEQ ID NO: 1394 - RNA, 20 nt, synthetic construct
  source 1..20: mol_type = other RNA
tggcactcggagttgggggg

SEQ ID NO: 1395 - RNA, 20 nt, synthetic construct
  source 1..20: mol_type = other RNA
ttggcactcggagttggggg

SEQ ID NO: 1396 - RNA, 20 nt, synthetic construct
  source 1..20: mol_type = other RNA
cttggcactcggagttgggg

SEQ ID NO: 1397 - RNA, 20 nt, synthetic construct
  source 1..20: mol_type = other RNA
ccttggcactcggagttggg

SEQ ID NO: 1398 - RNA, 20 nt, synthetic construct
  source 1..20: mol_type = other RNA
cccttggcactcggagttgg

SEQ ID NO: 1399 - RNA, 20 nt, synthetic construct
  source 1..20: mol_type = other RNA
ccccttggcactcggagttg

SEQ ID NO: 1400 - RNA, 20 nt, synthetic construct
  source 1..20: mol_type = other RNA
tccccttggcactcggagtt

SEQ ID NO: 1401 - RNA, 20 nt, synthetic construct
  source 1..20: mol_type = other RNA
ctccccttggcactcggagt

SEQ ID NO: 1402 - RNA, 20 nt, synthetic construct
  source 1..20: mol_type = other RNA
tctccccttggcactcggag

SEQ ID NO: 1403 - RNA, 20 nt, synthetic construct
  source 1..20: mol_type = other RNA
ctctccccttggcactcgga

SEQ ID NO: 1404 - RNA, 20 nt, synthetic construct
  source 1..20: mol_type = other RNA
cctctccccttggcactcgg

SEQ ID NO: 1405 - RNA, 20 nt, synthetic construct
  source 1..20: mol_type = other RNA
tcctctccccttggcactcg

SEQ ID NO: 1406 - RNA, 20 nt, synthetic construct
  source 1..20: mol_type = other RNA
ttcctctccccttggcactc

SEQ ID NO: 1407 - RNA, 20 nt, synthetic construct
  source 1..20: mol_type = other RNA
tttcctctccccttggcact

SEQ ID NO: 1408 - RNA, 20 nt, synthetic construct
  source 1..20: mol_type = other RNA
atttcctctccccttggcac

SEQ ID NO: 1409 - RNA, 20 nt, synthetic construct
  source 1..20: mol_type = other RNA
aatttcctctccccttggca

SEQ ID NO: 1410 - RNA, 20 nt, synthetic construct
  source 1..20: mol_type = other RNA
gaatttcctctccccttggc

SEQ ID NO: 1411 - RNA, 20 nt, synthetic construct
  source 1..20: mol_type = other RNA
ggaatttcctctccccttgg

SEQ ID NO: 1412 - RNA, 20 nt, synthetic construct
  source 1..20: mol_type = other RNA
gggaatttcctctccccttg

SEQ ID NO: 1413 - RNA, 20 nt, synthetic construct
  source 1..20: mol_type = other RNA
tgggaatttcctctcccctt

SEQ ID NO: 1414 - RNA, 20 nt, synthetic construct
  source 1..20: mol_type = other RNA
ttgggaatttcctctcccct

SEQ ID NO: 1415 - RNA, 20 nt, synthetic construct
  source 1..20: mol_type = other RNA
tttgggaatttcctctcccc

SEQ ID NO: 1416 - RNA, 20 nt, synthetic construct
  source 1..20: mol_type = other RNA
ttttgggaatttcctctccc

SEQ ID NO: 1417 - RNA, 20 nt, synthetic construct
  source 1..20: mol_type = other RNA
cttttgggaatttcctctcc

SEQ ID NO: 1418 - RNA, 20 nt, synthetic construct
  source 1..20: mol_type = other RNA
ccttttgggaatttcctctc

SEQ ID NO: 1419 - RNA, 20 nt, synthetic construct
  source 1..20: mol_type = other RNA
cccttttgggaatttcctct

SEQ ID NO: 1420 - RNA, 20 nt, synthetic construct
  source 1..20: mol_type = other RNA
ccccttttgggaatttcctc

SEQ ID NO: 1421 - RNA, 20 nt, synthetic construct
  source 1..20: mol_type = other RNA
tccccttttgggaatttcct

SEQ ID NO: 1422 - RNA, 20 nt, synthetic construct
  source 1..20: mol_type = other RNA
ctccccttttgggaatttcc

SEQ ID NO: 1423 - RNA, 20 nt, synthetic construct
  source 1..20: mol_type = other RNA
gctccccttttgggaatttc

SEQ ID NO: 1424 - RNA, 20 nt, synthetic construct
  source 1..20: mol_type = other RNA
ggctccccttttgggaattt

SEQ ID NO: 1425 - RNA, 20 nt, synthetic construct
  source 1..20: mol_type = other RNA
tggctccccttttgggaatt

SEQ ID NO: 1426 - RNA, 20 nt, synthetic construct
  source 1..20: mol_type = other RNA
ttggctccccttttgggaat

SEQ ID NO: 1427 - RNA, 20 nt, synthetic construct
  source 1..20: mol_type = other RNA
gttggctccccttttgggaa

SEQ ID NO: 1428 - RNA, 20 nt, synthetic construct
  source 1..20: mol_type = other RNA
ggttggctccccttttggga

SEQ ID NO: 1429 - RNA, 20 nt, synthetic construct
  source 1..20: mol_type = other RNA
aggttggctccccttttggg

SEQ ID NO: 1430 - RNA, 20 nt, synthetic construct
  source 1..20: mol_type = other RNA
taggttggctccccttttgg

SEQ ID NO: 1431 - RNA, 20 nt, synthetic construct
  source 1..20: mol_type = other RNA
ctaggttggctccccttttg

SEQ ID NO: 1432 - RNA, 20 nt, synthetic construct
  source 1..20: mol_type = other RNA
gctaggttggctcccctttt

SEQ ID NO: 1433 - RNA, 20 nt, synthetic construct
  source 1..20: mol_type = other RNA
agctaggttggctccccttt

SEQ ID NO: 1434 - RNA, 20 nt, synthetic construct
  source 1..20: mol_type = other RNA
cagctaggttggctcccctt

SEQ ID NO: 1435 - RNA, 20 nt, synthetic construct
  source 1..20: mol_type = other RNA
gcagctaggttggctcccct

SEQ ID NO: 1436 - RNA, 20 nt, synthetic construct
  source 1..20: mol_type = other RNA
tgcagctaggttggctcccc

SEQ ID NO: 1437 - RNA, 20 nt, synthetic construct
  source 1..20: mol_type = other RNA
ttgcagctaggttggctccc

SEQ ID NO: 1438 - RNA, 20 nt, synthetic construct
  source 1..20: mol_type = other RNA
tttgcagctaggttggctcc

SEQ ID NO: 1439 - RNA, 20 nt, synthetic construct
  source 1..20: mol_type = other RNA
atttgcagctaggttggctc

SEQ ID NO: 1440 - RNA, 20 nt, synthetic construct
  source 1..20: mol_type = other RNA
catttgcagctaggttggct

SEQ ID NO: 1441 - RNA, 20 nt, synthetic construct
  source 1..20: mol_type = other RNA
tcatttgcagctaggttggc

SEQ ID NO: 1442 - RNA, 20 nt, synthetic construct
  source 1..20: mol_type = other RNA
ctcatttgcagctaggttgg

SEQ ID NO: 1443 - RNA, 20 nt, synthetic construct
  source 1..20: mol_type = other RNA
gctcatttgcagctaggttg

SEQ ID NO: 1444 - RNA, 20 nt, synthetic construct
  source 1..20: mol_type = other RNA
tgctcatttgcagctaggtt

SEQ ID NO: 1445 - RNA, 20 nt, synthetic construct
  source 1..20: mol_type = other RNA
ctgctcatttgcagctaggt

SEQ ID NO: 1446 - RNA, 20 nt, synthetic construct
  source 1..20: mol_type = other RNA
cctgctcatttgcagctagg

SEQ ID NO: 1447 - RNA, 20 nt, synthetic construct
  source 1..20: mol_type = other RNA
tcctgctcatttgcagctag

SEQ ID NO: 1448 - RNA, 20 nt, synthetic construct
  source 1..20: mol_type = other RNA
ttcctgctcatttgcagcta

SEQ ID NO: 1449 - RNA, 20 nt, synthetic construct
  source 1..20: mol_type = other RNA
tttcctgctcatttgcagct

SEQ ID NO: 1450 - RNA, 20 nt, synthetic construct
  source 1..20: mol_type = other RNA
ttttcctgctcatttgcagc

SEQ ID NO: 1451 - RNA, 20 nt, synthetic construct
  source 1..20: mol_type = other RNA
tttttcctgctcatttgcag

SEQ ID NO: 1452 - RNA, 20 nt, synthetic construct
  source 1..20: mol_type = other RNA
ctttttcctgctcatttgca

SEQ ID NO: 1453 - RNA, 20 nt, synthetic construct
  source 1..20: mol_type = other RNA
actttttcctgctcatttgc

SEQ ID NO: 1454 - RNA, 20 nt, synthetic construct
  source 1..20: mol_type = other RNA
cactttttcctgctcatttg

SEQ ID NO: 1455 - RNA, 20 nt, synthetic construct
  source 1..20: mol_type = other RNA
ccactttttcctgctcattt

SEQ ID NO: 1456 - RNA, 20 nt, synthetic construct
  source 1..20: mol_type = other RNA
gccactttttcctgctcatt

SEQ ID NO: 1457 - RNA, 20 nt, synthetic construct
  source 1..20: mol_type = other RNA
agccactttttcctgctcat

SEQ ID NO: 1458 - RNA, 20 nt, synthetic construct
  source 1..20: mol_type = other RNA
cagccactttttcctgctca

SEQ ID NO: 1459 - RNA, 20 nt, synthetic construct
  source 1..20: mol_type = other RNA
ccagccactttttcctgctc

SEQ ID NO: 1460 - RNA, 20 nt, synthetic construct
  source 1..20: mol_type = other RNA
cccagccactttttcctgct

SEQ ID NO: 1461 - RNA, 20 nt, synthetic construct
  source 1..20: mol_type = other RNA
tcccagccactttttcctgc

SEQ ID NO: 1462 - RNA, 20 nt, synthetic construct
  source 1..20: mol_type = other RNA
ctcccagccactttttcctg

SEQ ID NO: 1463 - RNA, 20 nt, synthetic construct
  source 1..20: mol_type = other RNA
tctcccagccactttttcct

SEQ ID NO: 1464 - RNA, 20 nt, synthetic construct
  source 1..20: mol_type = other RNA
ctctcccagccactttttcc

SEQ ID NO: 1465 - RNA, 20 nt, synthetic construct
  source 1..20: mol_type = other RNA
cctctcccagccactttttc

SEQ ID NO: 1466 - RNA, 20 nt, synthetic construct
  source 1..20: mol_type = other RNA
gcctctcccagccacttttt

SEQ ID NO: 1467 - RNA, 20 nt, synthetic construct
  source 1..20: mol_type = other RNA
cgcctctcccagccactttt

SEQ ID NO: 1468 - RNA, 20 nt, synthetic construct
  source 1..20: mol_type = other RNA
ccgcctctcccagccacttt

SEQ ID NO: 1469 - RNA, 20 nt, synthetic construct
  source 1..20: mol_type = other RNA
tccgcctctcccagccactt

SEQ ID NO: 1470 - RNA, 20 nt, synthetic construct
  source 1..20: mol_type = other RNA
ttccgcctctcccagccact

SEQ ID NO: 1471 - RNA, 20 nt, synthetic construct
  source 1..20: mol_type = other RNA
cttccgcctctcccagccac

SEQ ID NO: 1472 - RNA, 20 nt, synthetic construct
  source 1..20: mol_type = other RNA
gcttccgcctctcccagcca

SEQ ID NO: 1473 - RNA, 20 nt, synthetic construct
  source 1..20: mol_type = other RNA
agcttccgcctctcccagcc

SEQ ID NO: 1474 - RNA, 20 nt, synthetic construct
  source 1..20: mol_type = other RNA
tagcttccgcctctcccagc

SEQ ID NO: 1475 - RNA, 20 nt, synthetic construct
  source 1..20: mol_type = other RNA
ctagcttccgcctctcccag

SEQ ID NO: 1476 - RNA, 20 nt, synthetic construct
  source 1..20: mol_type = other RNA
gctagcttccgcctctccca

SEQ ID NO: 1477 - RNA, 20 nt, synthetic construct
  source 1..20: mol_type = other RNA
agctagcttccgcctctccc

SEQ ID NO: 1478 - RNA, 20 nt, synthetic construct
  source 1..20: mol_type = other RNA
gagctagcttccgcctctcc

SEQ ID NO: 1479 - RNA, 20 nt, synthetic construct
  source 1..20: mol_type = other RNA
cgagctagcttccgcctctc

SEQ ID NO: 1480 - RNA, 20 nt, synthetic construct
  source 1..20: mol_type = other RNA
acgagctagcttccgcctct

SEQ ID NO: 1481 - RNA, 20 nt, synthetic construct
  source 1..20: mol_type = other RNA
gacgagctagcttccgcctc

SEQ ID NO: 1482 - RNA, 20 nt, synthetic construct
  source 1..20: mol_type = other RNA
ggacgagctagcttccgcct

SEQ ID NO: 1483 - RNA, 20 nt, synthetic construct
  source 1..20: mol_type = other RNA
gggacgagctagcttccgcc

SEQ ID NO: 1484 - RNA, 20 nt, synthetic construct
  source 1..20: mol_type = other RNA
tgggacgagctagcttccgc

SEQ ID NO: 1485 - RNA, 20 nt, synthetic construct
  source 1..20: mol_type = other RNA
gtgggacgagctagcttccg

SEQ ID NO: 1486 - RNA, 20 nt, synthetic construct
  source 1..20: mol_type = other RNA
ggtgggacgagctagcttcc

SEQ ID NO: 1487 - RNA, 20 nt, synthetic construct
  source 1..20: mol_type = other RNA
gggtgggacgagctagcttc

SEQ ID NO: 1488 - RNA, 20 nt, synthetic construct
  source 1..20: mol_type = other RNA
cgggtgggacgagctagctt

SEQ ID NO: 1489 - RNA, 20 nt, synthetic construct
  source 1..20: mol_type = other RNA
gcgggtgggacgagctagct

SEQ ID NO: 1490 - RNA, 20 nt, synthetic construct
  source 1..20: mol_type = other RNA
tgcgggtgggacgagctagc

SEQ ID NO: 1491 - RNA, 20 nt, synthetic construct
  source 1..20: mol_type = other RNA
ttgcgggtgggacgagctag

SEQ ID NO: 1492 - RNA, 20 nt, synthetic construct
  source 1..20: mol_type = other RNA
gttgcgggtgggacgagcta

SEQ ID NO: 1493 - RNA, 20 nt, synthetic construct
  source 1..20: mol_type = other RNA
tgttgcgggtgggacgagct

SEQ ID NO: 1494 - RNA, 20 nt, synthetic construct
  source 1..20: mol_type = other RNA
ttgttgcgggtgggacgagc

SEQ ID NO: 1495 - RNA, 20 nt, synthetic construct
  source 1..20: mol_type = other RNA
cttgttgcgggtgggacgag

SEQ ID NO: 1496 - RNA, 20 nt, synthetic construct
  source 1..20: mol_type = other RNA
tcttgttgcgggtgggacga

SEQ ID NO: 1497 - RNA, 20 nt, synthetic construct
  source 1..20: mol_type = other RNA
ctcttgttgcgggtgggacg

SEQ ID NO: 1498 - RNA, 20 nt, synthetic construct
  source 1..20: mol_type = other RNA
cctcttgttgcgggtgggac

SEQ ID NO: 1499 - RNA, 20 nt, synthetic construct
  source 1..20: mol_type = other RNA
tcctcttgttgcgggtggga

SEQ ID NO: 1500 - RNA, 20 nt, synthetic construct
  source 1..20: mol_type = other RNA
ttcctcttgttgcgggtggg

SEQ ID NO: 1501 - RNA, 20 nt, synthetic construct
  source 1..20: mol_type = other RNA
cttcctcttgttgcgggtgg

SEQ ID NO: 1502 - RNA, 20 nt, synthetic construct
  source 1..20: mol_type = other RNA
acttcctcttgttgcgggtg

SEQ ID NO: 1503 - RNA, 20 nt, synthetic construct
  source 1..20: mol_type = other RNA
tacttcctcttgttgcgggt

SEQ ID NO: 1504 - RNA, 20 nt, synthetic construct
  source 1..20: mol_type = other RNA
ttacttcctcttgttgcggg

SEQ ID NO: 1505 - RNA, 20 nt, synthetic construct
  source 1..20: mol_type = other RNA
cttacttcctcttgttgcgg

SEQ ID NO: 1506 - RNA, 20 nt, synthetic construct
  source 1..20: mol_type = other RNA
ccttacttcctcttgttgcg

SEQ ID NO: 1507 - RNA, 20 nt, synthetic construct
  source 1..20: mol_type = other RNA
tccttacttcctcttgttgc

SEQ ID NO: 1508 - RNA, 20 nt, synthetic construct
  source 1..20: mol_type = other RNA
ctccttacttcctcttgttg

SEQ ID NO: 1509 - RNA, 20 nt, synthetic construct
  source 1..20: mol_type = other RNA
cctccttacttcctcttgtt

SEQ ID NO: 1510 - RNA, 20 nt, synthetic construct
  source 1..20: mol_type = other RNA
tcctccttacttcctcttgt

SEQ ID NO: 1511 - RNA, 20 nt, synthetic construct
  source 1..20: mol_type = other RNA
ctcctccttacttcctcttg

SEQ ID NO: 1512 - RNA, 20 nt, synthetic construct
  source 1..20: mol_type = other RNA
gctcctccttacttcctctt

SEQ ID NO: 1513 - RNA, 20 nt, synthetic construct
  source 1..20: mol_type = other RNA
ggctcctccttacttcctct

SEQ ID NO: 1514 - RNA, 20 nt, synthetic construct
  source 1..20: mol_type = other RNA
tggctcctccttacttcctc

SEQ ID NO: 1515 - RNA, 20 nt, synthetic construct
  source 1..20: mol_type = other RNA
ctggctcctccttacttcct

SEQ ID NO: 1516 - RNA, 20 nt, synthetic construct
  source 1..20: mol_type = other RNA
tctggctcctccttacttcc

SEQ ID NO: 1517 - RNA, 20 nt, synthetic construct
  source 1..20: mol_type = other RNA
gtctggctcctccttacttc

SEQ ID NO: 1518 - RNA, 20 nt, synthetic construct
  source 1..20: mol_type = other RNA
ggtctggctcctccttactt

SEQ ID NO: 1519 - RNA, 20 nt, synthetic construct
  source 1..20: mol_type = other RNA
tggtctggctcctccttact

SEQ ID NO: 1520 - RNA, 20 nt, synthetic construct
  source 1..20: mol_type = other RNA
ctggtctggctcctccttac

SEQ ID NO: 1521 - RNA, 20 nt, synthetic construct
  source 1..20: mol_type = other RNA
cctggtctggctcctcctta

SEQ ID NO: 1522 - RNA, 20 nt, synthetic construct
  source 1..20: mol_type = other RNA
acctggtctggctcctcctt

SEQ ID NO: 1523 - RNA, 20 nt, synthetic construct
  source 1..20: mol_type = other RNA
aacctggtctggctcctcct

SEQ ID NO: 1524 - RNA, 20 nt, synthetic construct
  source 1..20: mol_type = other RNA
gaacctggtctggctcctcc

SEQ ID NO: 1525 - RNA, 20 nt, synthetic construct
  source 1..20: mol_type = other RNA
tgaacctggtctggctcctc

SEQ ID NO: 1526 - RNA, 20 nt, synthetic construct
  source 1..20: mol_type = other RNA
ctgaacctggtctggctcct

SEQ ID NO: 1527 - RNA, 20 nt, synthetic construct
  source 1..20: mol_type = other RNA
actgaacctggtctggctcc

SEQ ID NO: 1528 - RNA, 20 nt, synthetic construct
  source 1..20: mol_type = other RNA
gactgaacctggtctggctc

SEQ ID NO: 1529 - RNA, 20 nt, synthetic construct
  source 1..20: mol_type = other RNA
tgactgaacctggtctggct

SEQ ID NO: 1530 - RNA, 20 nt, synthetic construct
  source 1..20: mol_type = other RNA
gtgactgaacctggtctggc

SEQ ID NO: 1531 - RNA, 20 nt, synthetic construct
  source 1..20: mol_type = other RNA
ggtgactgaacctggtctgg

SEQ ID NO: 1532 - RNA, 20 nt, synthetic construct
  source 1..20: mol_type = other RNA
tggtgactgaacctggtctg

SEQ ID NO: 1533 - RNA, 20 nt, synthetic construct
  source 1..20: mol_type = other RNA
gtggtgactgaacctggtct

SEQ ID NO: 1534 - RNA, 20 nt, synthetic construct
  source 1..20: mol_type = other RNA
agtggtgactgaacctggtc

SEQ ID NO: 1535 - RNA, 20 nt, synthetic construct
  source 1..20: mol_type = other RNA
gagtggtgactgaacctggt

SEQ ID NO: 1536 - RNA, 20 nt, synthetic construct
  source 1..20: mol_type = other RNA
ggagtggtgactgaacctgg

SEQ ID NO: 1537 - RNA, 20 nt, synthetic construct
  source 1..20: mol_type = other RNA
gggagtggtgactgaacctg

SEQ ID NO: 1538 - RNA, 20 nt, synthetic construct
  source 1..20: mol_type = other RNA
tgggagtggtgactgaacct

SEQ ID NO: 1539 - RNA, 20 nt, synthetic construct
  source 1..20: mol_type = other RNA
ttgggagtggtgactgaacc

SEQ ID NO: 1540 - RNA, 20 nt, synthetic construct
  source 1..20: mol_type = other RNA
cttgggagtggtgactgaac

SEQ ID NO: 1541 - RNA, 20 nt, synthetic construct
  source 1..20: mol_type = other RNA
acttgggagtggtgactgaa

SEQ ID NO: 1542 - RNA, 20 nt, synthetic construct
  source 1..20: mol_type = other RNA
gacttgggagtggtgactga

SEQ ID NO: 1543 - RNA, 20 nt, synthetic construct
  source 1..20: mol_type = other RNA
ggacttgggagtggtgactg

SEQ ID NO: 1544 - RNA, 20 nt, synthetic construct
  source 1..20: mol_type = other RNA
gggacttgggagtggtgact

SEQ ID NO: 1545 - RNA, 20 nt, synthetic construct
  source 1..20: mol_type = other RNA
agggacttgggagtggtgac

SEQ ID NO: 1546 - RNA, 20 nt, synthetic construct
  source 1..20: mol_type = other RNA
tagggacttgggagtggtga

SEQ ID NO: 1547 - RNA, 20 nt, synthetic construct
  source 1..20: mol_type = other RNA
gtagggacttgggagtggtg

SEQ ID NO: 1548 - RNA, 20 nt, synthetic construct
  source 1..20: mol_type = other RNA
agtagggacttgggagtggt

SEQ ID NO: 1549 - RNA, 20 nt, synthetic construct
  source 1..20: mol_type = other RNA
tagtagggacttgggagtgg

SEQ ID NO: 1550 - RNA, 20 nt, synthetic construct
  source 1..20: mol_type = other RNA
gtagtagggacttgggagtg

SEQ ID NO: 1551 - RNA, 20 nt, synthetic construct
  source 1..20: mol_type = other RNA
ggtagtagggacttgggagt

SEQ ID NO: 1552 - RNA, 20 nt, synthetic construct
  source 1..20: mol_type = other RNA
aggtagtagggacttgggag

SEQ ID NO: 1553 - RNA, 20 nt, synthetic construct
  source 1..20: mol_type = other RNA
aaggtagtagggacttggga

SEQ ID NO: 1554 - RNA, 20 nt, synthetic construct
  source 1..20: mol_type = other RNA
gaaggtagtagggacttggg

SEQ ID NO: 1555 - RNA, 20 nt, synthetic construct
  source 1..20: mol_type = other RNA
cgaaggtagtagggacttgg

SEQ ID NO: 1556 - RNA, 20 nt, synthetic construct
  source 1..20: mol_type = other RNA
tcgaaggtagtagggacttg

SEQ ID NO: 1557 - RNA, 20 nt, synthetic construct
  source 1..20: mol_type = other RNA
ctcgaaggtagtagggactt

SEQ ID NO: 1558 - RNA, 20 nt, synthetic construct
  source 1..20: mol_type = other RNA
tctcgaaggtagtagggact

SEQ ID NO: 1559 - RNA, 20 nt, synthetic construct
  source 1..20: mol_type = other RNA
ttctcgaaggtagtagggac

SEQ ID NO: 1560 - RNA, 20 nt, synthetic construct
  source 1..20: mol_type = other RNA
cttctcgaaggtagtaggga

SEQ ID NO: 1561 - RNA, 20 nt, synthetic construct
  source 1..20: mol_type = other RNA
gcttctcgaaggtagtaggg

SEQ ID NO: 1562 - RNA, 20 nt, synthetic construct
  source 1..20: mol_type = other RNA
ggcttctcgaaggtagtagg

SEQ ID NO: 1563 - RNA, 20 nt, synthetic construct
  source 1..20: mol_type = other RNA
tggcttctcgaaggtagtag

SEQ ID NO: 1564 - RNA, 20 nt, synthetic construct
  source 1..20: mol_type = other RNA
ttggcttctcgaaggtagta

SEQ ID NO: 1565 - RNA, 20 nt, synthetic construct
  source 1..20: mol_type = other RNA
cttggcttctcgaaggtagt

SEQ ID NO: 1566 - RNA, 20 nt, synthetic construct
  source 1..20: mol_type = other RNA
ccttggcttctcgaaggtag

SEQ ID NO: 1567 - RNA, 20 nt, synthetic construct
  source 1..20: mol_type = other RNA
accttggcttctcgaaggta

SEQ ID NO: 1568 - RNA, 20 nt, synthetic construct
  source 1..20: mol_type = other RNA
gaccttggcttctcgaaggt

SEQ ID NO: 1569 - RNA, 20 nt, synthetic construct
  source 1..20: mol_type = other RNA
agaccttggcttctcgaagg

SEQ ID NO: 1570 - RNA, 20 nt, synthetic construct
  source 1..20: mol_type = other RNA
gagaccttggcttctcgaag

SEQ ID NO: 1571 - RNA, 20 nt, synthetic construct
  source 1..20: mol_type = other RNA
tgagaccttggcttctcgaa

SEQ ID NO: 1572 - RNA, 20 nt, synthetic construct
  source 1..20: mol_type = other RNA
ctgagaccttggcttctcga

SEQ ID NO: 1573 - RNA, 20 nt, synthetic construct
  source 1..20: mol_type = other RNA
cctgagaccttggcttctcg

SEQ ID NO: 1574 - RNA, 20 nt, synthetic construct
  source 1..20: mol_type = other RNA
acctgagaccttggcttctc

SEQ ID NO: 1575 - RNA, 20 nt, synthetic construct
  source 1..20: mol_type = other RNA
gacctgagaccttggcttct

SEQ ID NO: 1576 - RNA, 20 nt, synthetic construct
  source 1..20: mol_type = other RNA
agacctgagaccttggcttc

SEQ ID NO: 1577 - RNA, 20 nt, synthetic construct
  source 1..20: mol_type = other RNA
gagacctgagaccttggctt

SEQ ID NO: 1578 - RNA, 20 nt, synthetic construct
  source 1..20: mol_type = other RNA
cgagacctgagaccttggct

SEQ ID NO: 1579 - RNA, 20 nt, synthetic construct
  source 1..20: mol_type = other RNA
acgagacctgagaccttggc

SEQ ID NO: 1580 - RNA, 20 nt, synthetic construct
  source 1..20: mol_type = other RNA
aacgagacctgagaccttgg

SEQ ID NO: 1581 - RNA, 20 nt, synthetic construct
  source 1..20: mol_type = other RNA
gaacgagacctgagaccttg

SEQ ID NO: 1582 - RNA, 20 nt, synthetic construct
  source 1..20: mol_type = other RNA
ggaacgagacctgagacctt

SEQ ID NO: 1583 - RNA, 20 nt, synthetic construct
  source 1..20: mol_type = other RNA
gggaacgagacctgagacct

SEQ ID NO: 1584 - RNA, 20 nt, synthetic construct
  source 1..20: mol_type = other RNA
tgggaacgagacctgagacc

SEQ ID NO: 1585 - RNA, 20 nt, synthetic construct
  source 1..20: mol_type = other RNA
ctgggaacgagacctgagac

SEQ ID NO: 1586 - RNA, 20 nt, synthetic construct
  source 1..20: mol_type = other RNA
cctgggaacgagacctgaga

SEQ ID NO: 1587 - RNA, 20 nt, synthetic construct
  source 1..20: mol_type = other RNA
gcctgggaacgagacctgag

SEQ ID NO: 1588 - RNA, 20 nt, synthetic construct
  source 1..20: mol_type = other RNA
ggcctgggaacgagacctga

SEQ ID NO: 1589 - RNA, 20 nt, synthetic construct
  source 1..20: mol_type = other RNA
gggcctgggaacgagacctg

SEQ ID NO: 1590 - RNA, 20 nt, synthetic construct
  source 1..20: mol_type = other RNA
agggcctgggaacgagacct

SEQ ID NO: 1591 - RNA, 20 nt, synthetic construct
  source 1..20: mol_type = other RNA
gagggcctgggaacgagacc

SEQ ID NO: 1592 - RNA, 20 nt, synthetic construct
  source 1..20: mol_type = other RNA
cgagggcctgggaacgagac

SEQ ID NO: 1593 - RNA, 20 nt, synthetic construct
  source 1..20: mol_type = other RNA
ccgagggcctgggaacgaga

SEQ ID NO: 1594 - RNA, 20 nt, synthetic construct
  source 1..20: mol_type = other RNA
tccgagggcctgggaacgag

SEQ ID NO: 1595 - RNA, 20 nt, synthetic construct
  source 1..20: mol_type = other RNA
ctccgagggcctgggaacga

SEQ ID NO: 1596 - RNA, 20 nt, synthetic construct
  source 1..20: mol_type = other RNA
gctccgagggcctgggaacg

SEQ ID NO: 1597 - RNA, 20 nt, synthetic construct
  source 1..20: mol_type = other RNA
agctccgagggcctgggaac

SEQ ID NO: 1598 - RNA, 20 nt, synthetic construct
  source 1..20: mol_type = other RNA
gagctccgagggcctgggaa

SEQ ID NO: 1599 - RNA, 20 nt, synthetic construct
  source 1..20: mol_type = other RNA
ggagctccgagggcctggga

SEQ ID NO: 1600 - RNA, 20 nt, synthetic construct
  source 1..20: mol_type = other RNA
gggagctccgagggcctggg

SEQ ID NO: 1601 - RNA, 20 nt, synthetic construct
  source 1..20: mol_type = other RNA
tgggagctccgagggcctgg

SEQ ID NO: 1602 - RNA, 20 nt, synthetic construct
  source 1..20: mol_type = other RNA
ctgggagctccgagggcctg

SEQ ID NO: 1603 - RNA, 20 nt, synthetic construct
  source 1..20: mol_type = other RNA
gctgggagctccgagggcct

SEQ ID NO: 1604 - RNA, 20 nt, synthetic construct
  source 1..20: mol_type = other RNA
ggctgggagctccgagggcc

SEQ ID NO: 1605 - RNA, 20 nt, synthetic construct
  source 1..20: mol_type = other RNA
gggctgggagctccgagggc

SEQ ID NO: 1606 - RNA, 20 nt, synthetic construct
  source 1..20: mol_type = other RNA
tgggctgggagctccgaggg

SEQ ID NO: 1607 - RNA, 20 nt, synthetic construct
  source 1..20: mol_type = other RNA
ctgggctgggagctccgagg

SEQ ID NO: 1608 - RNA, 20 nt, synthetic construct
  source 1..20: mol_type = other RNA
cctgggctgggagctccgag

SEQ ID NO: 1609 - RNA, 20 nt, synthetic construct
  source 1..20: mol_type = other RNA
ccctgggctgggagctccga

SEQ ID NO: 1610 - RNA, 20 nt, synthetic construct
  source 1..20: mol_type = other RNA
accctgggctgggagctccg

SEQ ID NO: 1611 - RNA, 20 nt, synthetic construct
  source 1..20: mol_type = other RNA
gaccctgggctgggagctcc

SEQ ID NO: 1612 - RNA, 20 nt, synthetic construct
  source 1..20: mol_type = other RNA
cgaccctgggctgggagctc

SEQ ID NO: 1613 - RNA, 20 nt, synthetic construct
  source 1..20: mol_type = other RNA
gcgaccctgggctgggagct

SEQ ID NO: 1614 - RNA, 20 nt, synthetic construct
  source 1..20: mol_type = other RNA
cgcgaccctgggctgggagc

SEQ ID NO: 1615 - RNA, 20 nt, synthetic construct
  source 1..20: mol_type = other RNA
gcgcgaccctgggctgggag

SEQ ID NO: 1616 - RNA, 20 nt, synthetic construct
  source 1..20: mol_type = other RNA
cgcgcgaccctgggctggga

SEQ ID NO: 1617 - RNA, 20 nt, synthetic construct
  source 1..20: mol_type = other RNA
gcgcgcgaccctgggctggg

SEQ ID NO: 1618 - RNA, 20 nt, synthetic construct
  source 1..20: mol_type = other RNA
ggcgcgcgaccctgggctgg

SEQ ID NO: 1619 - RNA, 20 nt, synthetic construct
  source 1..20: mol_type = other RNA
gggcgcgcgaccctgggctg

SEQ ID NO: 1620 - RNA, 20 nt, synthetic construct
  source 1..20: mol_type = other RNA
ggggcgcgcgaccctgggct

SEQ ID NO: 1621 - RNA, 20 nt, synthetic construct
  source 1..20: mol_type = other RNA
aggggcgcgcgaccctgggc

SEQ ID NO: 1622 - RNA, 20 nt, synthetic construct
  source 1..20: mol_type = other RNA
gaggggcgcgcgaccctggg

SEQ ID NO: 1623 - RNA, 20 nt, synthetic construct
  source 1..20: mol_type = other RNA
ggaggggcgcgcgaccctgg

SEQ ID NO: 1624 - RNA, 20 nt, synthetic construct
  source 1..20: mol_type = other RNA
cggaggggcgcgcgaccctg

SEQ ID NO: 1625 - RNA, 20 nt, synthetic construct
  source 1..20: mol_type = other RNA
ccggaggggcgcgcgaccct

SEQ ID NO: 1626 - RNA, 20 nt, synthetic construct
  source 1..20: mol_type = other RNA
gccggaggggcgcgcgaccc

SEQ ID NO: 1627 - RNA, 20 nt, synthetic construct
  source 1..20: mol_type = other RNA
agccggaggggcgcgcgacc

SEQ ID NO: 1628 - RNA, 20 nt, synthetic construct
  source 1..20: mol_type = other RNA
gagccggaggggcgcgcgac

SEQ ID NO: 1629 - RNA, 20 nt, synthetic construct
  source 1..20: mol_type = other RNA
ggagccggaggggcgcgcga

SEQ ID NO: 1630 - RNA, 20 nt, synthetic construct
  source 1..20: mol_type = other RNA
tggagccggaggggcgcgcg

SEQ ID NO: 1631 - RNA, 20 nt, synthetic construct
  source 1..20: mol_type = other RNA
ctggagccggaggggcgcgc

SEQ ID NO: 1632 - RNA, 20 nt, synthetic construct
  source 1..20: mol_type = other RNA
cctggagccggaggggcgcg

SEQ ID NO: 1633 - RNA, 20 nt, synthetic construct
  source 1..20: mol_type = other RNA
gcctggagccggaggggcgc

SEQ ID NO: 1634 - RNA, 20 nt, synthetic construct
  source 1..20: mol_type = other RNA
ggcctggagccggaggggcg

SEQ ID NO: 1635 - RNA, 20 nt, synthetic construct
  source 1..20: mol_type = other RNA
cggcctggagccggaggggc

SEQ ID NO: 1636 - RNA, 20 nt, synthetic construct
  source 1..20: mol_type = other RNA
gcggcctggagccggagggg

SEQ ID NO: 1637 - RNA, 20 nt, synthetic construct
  source 1..20: mol_type = other RNA
ggcggcctggagccggaggg

SEQ ID NO: 1638 - RNA, 20 nt, synthetic construct
  source 1..20: mol_type = other RNA
cggcggcctggagccggagg

SEQ ID NO: 1639 - RNA, 20 nt, synthetic construct
  source 1..20: mol_type = other RNA
gcggcggcctggagccggag

SEQ ID NO: 1640 - RNA, 20 nt, synthetic construct
  source 1..20: mol_type = other RNA
cgcggcggcctggagccgga

SEQ ID NO: 1641 - RNA, 20 nt, synthetic construct
  source 1..20: mol_type = other RNA
ccgcggcggcctggagccgg

SEQ ID NO: 1642 - RNA, 20 nt, synthetic construct
  source 1..20: mol_type = other RNA
cccgcggcggcctggagccg

SEQ ID NO: 1643 - RNA, 20 nt, synthetic construct
  source 1..20: mol_type = other RNA
tcccgcggcggcctggagcc

SEQ ID NO: 1644 - RNA, 20 nt, synthetic construct
  source 1..20: mol_type = other RNA
ttcccgcggcggcctggagc

SEQ ID NO: 1645 - RNA, 20 nt, synthetic construct
  source 1..20: mol_type = other RNA
gttcccgcggcggcctggag

SEQ ID NO: 1646 - RNA, 20 nt, synthetic construct
  source 1..20: mol_type = other RNA
ggttcccgcggcggcctgga

SEQ ID NO: 1647 - RNA, 20 nt, synthetic construct
  source 1..20: mol_type = other RNA
tggttcccgcggcggcctgg

SEQ ID NO: 1648 - RNA, 20 nt, synthetic construct
  source 1..20: mol_type = other RNA
gtggttcccgcggcggcctg

SEQ ID NO: 1649 - RNA, 20 nt, synthetic construct
  source 1..20: mol_type = other RNA
ggtggttcccgcggcggcct

SEQ ID NO: 1650 - RNA, 20 nt, synthetic construct
  source 1..20: mol_type = other RNA
gggtggttcccgcggcggcc

SEQ ID NO: 1651 - RNA, 20 nt, synthetic construct
  source 1..20: mol_type = other RNA
tgggtggttcccgcggcggc

SEQ ID NO: 1652 - RNA, 20 nt, synthetic construct
  source 1..20: mol_type = other RNA
gtgggtggttcccgcggcgg

SEQ ID NO: 1653 - RNA, 20 nt, synthetic construct
  source 1..20: mol_type = other RNA
ggtgggtggttcccgcggcg

SEQ ID NO: 1654 - RNA, 20 nt, synthetic construct
  source 1..20: mol_type = other RNA
tggtgggtggttcccgcggc

SEQ ID NO: 1655 - RNA, 20 nt, synthetic construct
  source 1..20: mol_type = other RNA
gtggtgggtggttcccgcgg

SEQ ID NO: 1656 - RNA, 20 nt, synthetic construct
  source 1..20: mol_type = other RNA
ggtggtgggtggttcccgcg

SEQ ID NO: 1657 - RNA, 20 nt, synthetic construct
  source 1..20: mol_type = other RNA
tggtggtgggtggttcccgc

SEQ ID NO: 1658 - RNA, 20 nt, synthetic construct
  source 1..20: mol_type = other RNA
gtggtggtgggtggttcccg

SEQ ID NO: 1659 - RNA, 20 nt, synthetic construct
  source 1..20: mol_type = other RNA
ggtggtggtgggtggttccc

SEQ ID NO: 1660 - RNA, 20 nt, synthetic construct
  source 1..20: mol_type = other RNA
tggtggtggtgggtggttcc

SEQ ID NO: 1661 - RNA, 20 nt, synthetic construct
  source 1..20: mol_type = other RNA
ctggtggtggtgggtggttc

SEQ ID NO: 1662 - RNA, 20 nt, synthetic construct
  source 1..20: mol_type = other RNA
cctggtggtggtgggtggtt

SEQ ID NO: 1663 - RNA, 20 nt, synthetic construct
  source 1..20: mol_type = other RNA
tcctggtggtggtgggtggt

SEQ ID NO: 1664 - RNA, 20 nt, synthetic construct
  source 1..20: mol_type = other RNA
ctcctggtggtggtgggtgg

SEQ ID NO: 1665 - RNA, 20 nt, synthetic construct
  source 1..20: mol_type = other RNA
tctcctggtggtggtgggtg

SEQ ID NO: 1666 - RNA, 20 nt, synthetic construct
  source 1..20: mol_type = other RNA
ctctcctggtggtggtgggt

SEQ ID NO: 1667 - RNA, 20 nt, synthetic construct
  source 1..20: mol_type = other RNA
cctctcctggtggtggtggg

SEQ ID NO: 1668 - RNA, 20 nt, synthetic construct
  source 1..20: mol_type = other RNA
ccctctcctggtggtggtgg

SEQ ID NO: 1669 - RNA, 20 nt, synthetic construct
  source 1..20: mol_type = other RNA
cccctctcctggtggtggtg

SEQ ID NO: 1670 - RNA, 20 nt, synthetic construct
  source 1..20: mol_type = other RNA
tcccctctcctggtggtggt

SEQ ID NO: 1671 - RNA, 20 nt, synthetic construct
  source 1..20: mol_type = other RNA
ttcccctctcctggtggtgg

SEQ ID NO: 1672 - RNA, 20 nt, synthetic construct
  source 1..20: mol_type = other RNA
cttcccctctcctggtggtg

SEQ ID NO: 1673 - RNA, 20 nt, synthetic construct
  source 1..20: mol_type = other RNA
tcttcccctctcctggtggt

SEQ ID NO: 1674 - RNA, 20 nt, synthetic construct
  source 1..20: mol_type = other RNA
ttcttcccctctcctggtgg

SEQ ID NO: 1675 - RNA, 20 nt, synthetic construct
  source 1..20: mol_type = other RNA
cttcttcccctctcctggtg

SEQ ID NO: 1676 - RNA, 20 nt, synthetic construct
  source 1..20: mol_type = other RNA
gcttcttcccctctcctggt

SEQ ID NO: 1677 - RNA, 20 nt, synthetic construct
  source 1..20: mol_type = other RNA
ggcttcttcccctctcctgg

SEQ ID NO: 1678 - RNA, 20 nt, synthetic construct
  source 1..20: mol_type = other RNA
tggcttcttcccctctcctg

SEQ ID NO: 1679 - RNA, 20 nt, synthetic construct
  source 1..20: mol_type = other RNA
ctggcttcttcccctctcct

SEQ ID NO: 1680 - RNA, 20 nt, synthetic construct
  source 1..20: mol_type = other RNA
gctggcttcttcccctctcc

SEQ ID NO: 1681 - RNA, 20 nt, synthetic construct
  source 1..20: mol_type = other RNA
tgctggcttcttcccctctc

SEQ ID NO: 1682 - RNA, 20 nt, synthetic construct
  source 1..20: mol_type = other RNA
gtgctggcttcttcccctct

SEQ ID NO: 1683 - RNA, 20 nt, synthetic construct
  source 1..20: mol_type = other RNA
ggtgctggcttcttcccctc

SEQ ID NO: 1684 - RNA, 20 nt, synthetic construct
  source 1..20: mol_type = other RNA
aggtgctggcttcttcccct

SEQ ID NO: 1685 - RNA, 20 nt, synthetic construct
  source 1..20: mol_type = other RNA
taggtgctggcttcttcccc

SEQ ID NO: 1686 - RNA, 20 nt, synthetic construct
  source 1..20: mol_type = other RNA
gtaggtgctggcttcttccc

SEQ ID NO: 1687 - RNA, 20 nt, synthetic construct
  source 1..20: mol_type = other RNA
ggtaggtgctggcttcttcc

SEQ ID NO: 1688 - RNA, 20 nt, synthetic construct
  source 1..20: mol_type = other RNA
cggtaggtgctggcttcttc

SEQ ID NO: 1689 - RNA, 20 nt, synthetic construct
  source 1..20: mol_type = other RNA
tcggtaggtgctggcttctt

SEQ ID NO: 1690 - RNA, 20 nt, synthetic construct
  source 1..20: mol_type = other RNA
gtcggtaggtgctggcttct

SEQ ID NO: 1691 - RNA, 20 nt, synthetic construct
  source 1..20: mol_type = other RNA
tgtcggtaggtgctggcttc

SEQ ID NO: 1692 - RNA, 20 nt, synthetic construct
  source 1..20: mol_type = other RNA
ctgtcggtaggtgctggctt

SEQ ID NO: 1693 - RNA, 20 nt, synthetic construct
  source 1..20: mol_type = other RNA
cctgtcggtaggtgctggct

SEQ ID NO: 1694 - RNA, 20 nt, synthetic construct
  source 1..20: mol_type = other RNA
ccctgtcggtaggtgctggc

SEQ ID NO: 1695 - RNA, 20 nt, synthetic construct
  source 1..20: mol_type = other RNA
cccctgtcggtaggtgctgg

SEQ ID NO: 1696 - RNA, 20 nt, synthetic construct
  source 1..20: mol_type = other RNA
acccctgtcggtaggtgctg

SEQ ID NO: 1697 - RNA, 20 nt, synthetic construct
  source 1..20: mol_type = other RNA
cacccctgtcggtaggtgct

SEQ ID NO: 1698 - RNA, 20 nt, synthetic construct
  source 1..20: mol_type = other RNA
ccacccctgtcggtaggtgc

SEQ ID NO: 1699 - RNA, 20 nt, synthetic construct
  source 1..20: mol_type = other RNA
tccacccctgtcggtaggtg

SEQ ID NO: 1700 - RNA, 20 nt, synthetic construct
  source 1..20: mol_type = other RNA
ctccacccctgtcggtaggt

SEQ ID NO: 1701 - RNA, 20 nt, synthetic construct
  source 1..20: mol_type = other RNA
gctccacccctgtcggtagg

SEQ ID NO: 1702 - RNA, 20 nt, synthetic construct
  source 1..20: mol_type = other RNA
agctccacccctgtcggtag

SEQ ID NO: 1703 - RNA, 20 nt, synthetic construct
  source 1..20: mol_type = other RNA
cagctccacccctgtcggta

SEQ ID NO: 1704 - RNA, 20 nt, synthetic construct
  source 1..20: mol_type = other RNA
ccagctccacccctgtcggt

SEQ ID NO: 1705 - RNA, 20 nt, synthetic construct
  source 1..20: mol_type = other RNA
cccagctccacccctgtcgg

SEQ ID NO: 1706 - RNA, 20 nt, synthetic construct
  source 1..20: mol_type = other RNA
acccagctccacccctgtcg

SEQ ID NO: 1707 - RNA, 20 nt, synthetic construct
  source 1..20: mol_type = other RNA
gacccagctccacccctgtc

SEQ ID NO: 1708 - RNA, 20 nt, synthetic construct
  source 1..20: mol_type = other RNA
tgacccagctccacccctgt

SEQ ID NO: 1709 - RNA, 20 nt, synthetic construct
  source 1..20: mol_type = other RNA
ttgacccagctccacccctg

SEQ ID NO: 1710 - RNA, 20 nt, synthetic construct
  source 1..20: mol_type = other RNA
cttgacccagctccacccct

SEQ ID NO: 1711 - RNA, 20 nt, synthetic construct
  source 1..20: mol_type = other RNA
tcttgacccagctccacccc

SEQ ID NO: 1712 - RNA, 20 nt, synthetic construct
  source 1..20: mol_type = other RNA
ttcttgacccagctccaccc

SEQ ID NO: 1713 - RNA, 20 nt, synthetic construct
  source 1..20: mol_type = other RNA
attcttgacccagctccacc

SEQ ID NO: 1714 - RNA, 20 nt, synthetic construct
  source 1..20: mol_type = other RNA
cattcttgacccagctccac

SEQ ID NO: 1715 - RNA, 20 nt, synthetic construct
  source 1..20: mol_type = other RNA
ccattcttgacccagctcca

SEQ ID NO: 1716 - RNA, 20 nt, synthetic construct
  source 1..20: mol_type = other RNA
accattcttgacccagctcc

SEQ ID NO: 1717 - RNA, 20 nt, synthetic construct
  source 1..20: mol_type = other RNA
caccattcttgacccagctc

SEQ ID NO: 1718 - RNA, 20 nt, synthetic construct
  source 1..20: mol_type = other RNA
acaccattcttgacccagct

SEQ ID NO: 1719 - RNA, 20 nt, synthetic construct
  source 1..20: mol_type = other RNA
cacaccattcttgacccagc

SEQ ID NO: 1720 - RNA, 20 nt, synthetic construct
  source 1..20: mol_type = other RNA
ccacaccattcttgacccag

SEQ ID NO: 1721 - RNA, 20 nt, synthetic construct
  source 1..20: mol_type = other RNA
accacaccattcttgaccca

SEQ ID NO: 1722 - RNA, 20 nt, synthetic construct
  source 1..20: mol_type = other RNA
gaccacaccattcttgaccc

SEQ ID NO: 1723 - RNA, 20 nt, synthetic construct
  source 1..20: mol_type = other RNA
ggaccacaccattcttgacc

SEQ ID NO: 1724 - RNA, 20 nt, synthetic construct
  source 1..20: mol_type = other RNA
gggaccacaccattcttgac

SEQ ID NO: 1725 - RNA, 20 nt, synthetic construct
  source 1..20: mol_type = other RNA
agggaccacaccattcttga

SEQ ID NO: 1726 - RNA, 20 nt, synthetic construct
  source 1..20: mol_type = other RNA
cagggaccacaccattcttg

SEQ ID NO: 1727 - RNA, 20 nt, synthetic construct
  source 1..20: mol_type = other RNA
gcagggaccacaccattctt

SEQ ID NO: 1728 - RNA, 20 nt, synthetic construct
  source 1..20: mol_type = other RNA
agcagggaccacaccattct

SEQ ID NO: 1729 - RNA, 20 nt, synthetic construct
  source 1..20: mol_type = other RNA
aagcagggaccacaccattc

SEQ ID NO: 1730 - RNA, 20 nt, synthetic construct
  source 1..20: mol_type = other RNA
aaagcagggaccacaccatt

SEQ ID NO: 1731 - RNA, 20 nt, synthetic construct
  source 1..20: mol_type = other RNA
caaagcagggaccacaccat

SEQ ID NO: 1732 - RNA, 20 nt, synthetic construct
  source 1..20: mol_type = other RNA
ccaaagcagggaccacacca

SEQ ID NO: 1733 - RNA, 20 nt, synthetic construct
  source 1..20: mol_type = other RNA
cccaaagcagggaccacacc

SEQ ID NO: 1734 - RNA, 20 nt, synthetic construct
  source 1..20: mol_type = other RNA
ccccaaagcagggaccacac

SEQ ID NO: 1735 - RNA, 20 nt, synthetic construct
  source 1..20: mol_type = other RNA
cccccaaagcagggaccaca

SEQ ID NO: 1736 - RNA, 20 nt, synthetic construct
  source 1..20: mol_type = other RNA
tcccccaaagcagggaccac

SEQ ID NO: 1737 - RNA, 20 nt, synthetic construct
  source 1..20: mol_type = other RNA
ttcccccaaagcagggacca

SEQ ID NO: 1738 - RNA, 20 nt, synthetic construct
  source 1..20: mol_type = other RNA
attcccccaaagcagggacc

SEQ ID NO: 1739 - RNA, 20 nt, synthetic construct
  source 1..20: mol_type = other RNA
cattcccccaaagcagggac

SEQ ID NO: 1740 - RNA, 20 nt, synthetic construct
  source 1..20: mol_type = other RNA
gcattcccccaaagcaggga

SEQ ID NO: 1741 - RNA, 20 nt, synthetic construct
  source 1..20: mol_type = other RNA
agcattcccccaaagcaggg

SEQ ID NO: 1742 - RNA, 20 nt, synthetic construct
  source 1..20: mol_type = other RNA
cagcattcccccaaagcagg

SEQ ID NO: 1743 - RNA, 20 nt, synthetic construct
  source 1..20: mol_type = other RNA
ccagcattcccccaaagcag

SEQ ID NO: 1744 - RNA, 20 nt, synthetic construct
  source 1..20: mol_type = other RNA
cccagcattcccccaaagca

SEQ ID NO: 1745 - RNA, 20 nt, synthetic construct
  source 1..20: mol_type = other RNA
ccccagcattcccccaaagc

SEQ ID NO: 1746 - RNA, 20 nt, synthetic construct
  source 1..20: mol_type = other RNA
tccccagcattcccccaaag

SEQ ID NO: 1747 - RNA, 20 nt, synthetic construct
  source 1..20: mol_type = other RNA
ctccccagcattcccccaaa

SEQ ID NO: 1748 - RNA, 20 nt, synthetic construct
  source 1..20: mol_type = other RNA
cctccccagcattcccccaa

SEQ ID NO: 1749 - RNA, 20 nt, synthetic construct
  source 1..20: mol_type = other RNA
acctccccagcattccccca

SEQ ID NO: 1750 - RNA, 20 nt, synthetic construct
  source 1..20: mol_type = other RNA
tacctccccagcattccccc

SEQ ID NO: 1751 - RNA, 20 nt, synthetic construct
  source 1..20: mol_type = other RNA
ctacctccccagcattcccc

SEQ ID NO: 1752 - RNA, 20 nt, synthetic construct
  source 1..20: mol_type = other RNA
tctacctccccagcattccc

SEQ ID NO: 1753 - RNA, 20 nt, synthetic construct
  source 1..20: mol_type = other RNA
ttctacctccccagcattcc

SEQ ID NO: 1754 - RNA, 20 nt, synthetic construct
  source 1..20: mol_type = other RNA
tttctacctccccagcattc

SEQ ID NO: 1755 - RNA, 20 nt, synthetic construct
  source 1..20: mol_type = other RNA
ctttctacctccccagcatt

SEQ ID NO: 1756 - RNA, 20 nt, synthetic construct
  source 1..20: mol_type = other RNA
gctttctacctccccagcat

SEQ ID NO: 1757 - RNA, 20 nt, synthetic construct
  source 1..20: mol_type = other RNA
ggctttctacctccccagca

SEQ ID NO: 1758 - RNA, 20 nt, synthetic construct
  source 1..20: mol_type = other RNA
gggctttctacctccccagc

SEQ ID NO: 1759 - RNA, 20 nt, synthetic construct
  source 1..20: mol_type = other RNA
ggggctttctacctccccag

SEQ ID NO: 1760 - RNA, 20 nt, synthetic construct
  source 1..20: mol_type = other RNA
aggggctttctacctcccca

SEQ ID NO: 1761 - RNA, 20 nt, synthetic construct
  source 1..20: mol_type = other RNA
aaggggctttctacctcccc

SEQ ID NO: 1762 - RNA, 20 nt, synthetic construct
  source 1..20: mol_type = other RNA
gaaggggctttctacctccc

SEQ ID NO: 1763 - RNA, 20 nt, synthetic construct
  source 1..20: mol_type = other RNA
agaaggggctttctacctcc

SEQ ID NO: 1764 - RNA, 20 nt, synthetic construct
  source 1..20: mol_type = other RNA
tagaaggggctttctacctc

SEQ ID NO: 1765 - RNA, 20 nt, synthetic construct
  source 1..20: mol_type = other RNA
ttagaaggggctttctacct

SEQ ID NO: 1766 - RNA, 20 nt, synthetic construct
  source 1..20: mol_type = other RNA
gttagaaggggctttctacc

SEQ ID NO: 1767 - RNA, 20 nt, synthetic construct
  source 1..20: mol_type = other RNA
cgttagaaggggctttctac

SEQ ID NO: 1768 - RNA, 20 nt, synthetic construct
  source 1..20: mol_type = other RNA
ccgttagaaggggctttcta

SEQ ID NO: 1769 - RNA, 20 nt, synthetic construct
  source 1..20: mol_type = other RNA
cccgttagaaggggctttct

SEQ ID NO: 1770 - RNA, 20 nt, synthetic construct
  source 1..20: mol_type = other RNA
ccccgttagaaggggctttc

SEQ ID NO: 1771 - RNA, 20 nt, synthetic construct
  source 1..20: mol_type = other RNA
gccccgttagaaggggcttt

SEQ ID NO: 1772 - RNA, 20 nt, synthetic construct
  source 1..20: mol_type = other RNA
cgccccgttagaaggggctt

SEQ ID NO: 1773 - RNA, 20 nt, synthetic construct
  source 1..20: mol_type = other RNA
acgccccgttagaaggggct

SEQ ID NO: 1774 - RNA, 20 nt, synthetic construct
  source 1..20: mol_type = other RNA
gacgccccgttagaaggggc

SEQ ID NO: 1775 - RNA, 20 nt, synthetic construct
  source 1..20: mol_type = other RNA
tgacgccccgttagaagggg

SEQ ID NO: 1776 - RNA, 20 nt, synthetic construct
  source 1..20: mol_type = other RNA
gtgacgccccgttagaaggg

SEQ ID NO: 1777 - RNA, 20 nt, synthetic construct
  source 1..20: mol_type = other RNA
agtgacgccccgttagaagg

SEQ ID NO: 1778 - RNA, 20 nt, synthetic construct
  source 1..20: mol_type = other RNA
cagtgacgccccgttagaag

SEQ ID NO: 1779 - RNA, 20 nt, synthetic construct
  source 1..20: mol_type = other RNA
gcagtgacgccccgttagaa

SEQ ID NO: 1780 - RNA, 20 nt, synthetic construct
  source 1..20: mol_type = other RNA
tgcagtgacgccccgttaga

SEQ ID NO: 1781 - RNA, 20 nt, synthetic construct
  source 1..20: mol_type = other RNA
ttgcagtgacgccccgttag

SEQ ID NO: 1782 - RNA, 20 nt, synthetic construct
  source 1..20: mol_type = other RNA
attgcagtgacgccccgtta

SEQ ID NO: 1783 - RNA, 20 nt, synthetic construct
  source 1..20: mol_type = other RNA
aattgcagtgacgccccgtt

SEQ ID NO: 1784 - RNA, 20 nt, synthetic construct
  source 1..20: mol_type = other RNA
taattgcagtgacgccccgt

SEQ ID NO: 1785 - RNA, 20 nt, synthetic construct
  source 1..20: mol_type = other RNA
gtaattgcagtgacgccccg

SEQ ID NO: 1786 - RNA, 20 nt, synthetic construct
  source 1..20: mol_type = other RNA
agtaattgcagtgacgcccc

SEQ ID NO: 1787 - RNA, 20 nt, synthetic construct
  source 1..20: mol_type = other RNA
cagtaattgcagtgacgccc

SEQ ID NO: 1788 - RNA, 20 nt, synthetic construct
  source 1..20: mol_type = other RNA
gcagtaattgcagtgacgcc

SEQ ID NO: 1789 - RNA, 20 nt, synthetic construct
  source 1..20: mol_type = other RNA
agcagtaattgcagtgacgc

SEQ ID NO: 1790 - RNA, 20 nt, synthetic construct
  source 1..20: mol_type = other RNA
aagcagtaattgcagtgacg

SEQ ID NO: 1791 - RNA, 20 nt, synthetic construct
  source 1..20: mol_type = other RNA
gaagcagtaattgcagtgac

SEQ ID NO: 1792 - RNA, 20 nt, synthetic construct
  source 1..20: mol_type = other RNA
ggaagcagtaattgcagtga

SEQ ID NO: 1793 - RNA, 20 nt, synthetic construct
  source 1..20: mol_type = other RNA
aggaagcagtaattgcagtg

SEQ ID NO: 1794 - RNA, 20 nt, synthetic construct
  source 1..20: mol_type = other RNA
gaggaagcagtaattgcagt

SEQ ID NO: 1795 - RNA, 20 nt, synthetic construct
  source 1..20: mol_type = other RNA
agaggaagcagtaattgcag

SEQ ID NO: 1796 - RNA, 20 nt, synthetic construct
  source 1..20: mol_type = other RNA
aagaggaagcagtaattgca

SEQ ID NO: 1797 - RNA, 20 nt, synthetic construct
  source 1..20: mol_type = other RNA
aaagaggaagcagtaattgc

SEQ ID NO: 1798 - RNA, 20 nt, synthetic construct
  source 1..20: mol_type = other RNA
gaaagaggaagcagtaattg

SEQ ID NO: 1799 - RNA, 20 nt, synthetic construct
  source 1..20: mol_type = other RNA
ggaaagaggaagcagtaatt

SEQ ID NO: 1800 - RNA, 20 nt, synthetic construct
  source 1..20: mol_type = other RNA
gggaaagaggaagcagtaat

SEQ ID NO: 1801 - RNA, 20 nt, synthetic construct
  source 1..20: mol_type = other RNA
tgggaaagaggaagcagtaa

SEQ ID NO: 1802 - RNA, 20 nt, synthetic construct
  source 1..20: mol_type = other RNA
atgggaaagaggaagcagta

SEQ ID NO: 1803 - RNA, 20 nt, synthetic construct
  source 1..20: mol_type = other RNA
tatgggaaagaggaagcagt

SEQ ID NO: 1804 - RNA, 20 nt, synthetic construct
  source 1..20: mol_type = other RNA
ttatgggaaagaggaagcag

SEQ ID NO: 1805 - RNA, 20 nt, synthetic construct
  source 1..20: mol_type = other RNA
tttatgggaaagaggaagca

SEQ ID NO: 1806 - RNA, 20 nt, synthetic construct
  source 1..20: mol_type = other RNA
ttttatgggaaagaggaagc

SEQ ID NO: 1807 - RNA, 20 nt, synthetic construct
  source 1..20: mol_type = other RNA
gttttatgggaaagaggaag

SEQ ID NO: 1808 - RNA, 20 nt, synthetic construct
  source 1..20: mol_type = other RNA
agttttatgggaaagaggaa

SEQ ID NO: 1809 - RNA, 20 nt, synthetic construct
  source 1..20: mol_type = other RNA
gagttttatgggaaagagga

SEQ ID NO: 1810 - RNA, 20 nt, synthetic construct
  source 1..20: mol_type = other RNA
ggagttttatgggaaagagg

SEQ ID NO: 1811 - RNA, 20 nt, synthetic construct
  source 1..20: mol_type = other RNA
gggagttttatgggaaagag

SEQ ID NO: 1812 - RNA, 20 nt, synthetic construct
  source 1..20: mol_type = other RNA
ggggagttttatgggaaaga

SEQ ID NO: 1813 - RNA, 20 nt, synthetic construct
  source 1..20: mol_type = other RNA
gggggagttttatgggaaag

SEQ ID NO: 1814 - RNA, 20 nt, synthetic construct
  source 1..20: mol_type = other RNA
agggggagttttatgggaaa

SEQ ID NO: 1815 - RNA, 20 nt, synthetic construct
  source 1..20: mol_type = other RNA
tagggggagttttatgggaa

SEQ ID NO: 1816 - RNA, 20 nt, synthetic construct
  source 1..20: mol_type = other RNA
ctagggggagttttatggga

SEQ ID NO: 1817 - RNA, 20 nt, synthetic construct
  source 1..20: mol_type = other RNA
actagggggagttttatggg

SEQ ID NO: 1818 - RNA, 20 nt, synthetic construct
  source 1..20: mol_type = other RNA
cactagggggagttttatgg

SEQ ID NO: 1819 - RNA, 20 nt, synthetic construct
  source 1..20: mol_type = other RNA
acactagggggagttttatg

SEQ ID NO: 1820 - RNA, 20 nt, synthetic construct
  source 1..20: mol_type = other RNA
tacactagggggagttttat

SEQ ID NO: 1821 - RNA, 20 nt, synthetic construct
  source 1..20: mol_type = other RNA
atacactagggggagtttta

SEQ ID NO: 1822 - RNA, 20 nt, synthetic construct
  source 1..20: mol_type = other RNA
gatacactagggggagtttt

SEQ ID NO: 1823 - RNA, 20 nt, synthetic construct
  source 1..20: mol_type = other RNA
tgatacactagggggagttt

SEQ ID NO: 1824 - RNA, 20 nt, synthetic construct
  source 1..20: mol_type = other RNA
ctgatacactagggggagtt

SEQ ID NO: 1825 - RNA, 20 nt, synthetic construct
  source 1..20: mol_type = other RNA
tctgatacactagggggagt

SEQ ID NO: 1826 - RNA, 20 nt, synthetic construct
  source 1..20: mol_type = other RNA
ttctgatacactagggggag

SEQ ID NO: 1827 - RNA, 20 nt, synthetic construct
  source 1..20: mol_type = other RNA
gttctgatacactaggggga

SEQ ID NO: 1828 - RNA, 20 nt, synthetic construct
  source 1..20: mol_type = other RNA
ggttctgatacactaggggg

SEQ ID NO: 1829 - RNA, 20 nt, synthetic construct
  source 1..20: mol_type = other RNA
gggttctgatacactagggg

SEQ ID NO: 1830 - RNA, 20 nt, synthetic construct
  source 1..20: mol_type = other RNA
ggggttctgatacactaggg

SEQ ID NO: 1831 - RNA, 20 nt, synthetic construct
  source 1..20: mol_type = other RNA
gggggttctgatacactagg

SEQ ID NO: 1832 - RNA, 20 nt, synthetic construct
  source 1..20: mol_type = other RNA
tgggggttctgatacactag

SEQ ID NO: 1833 - RNA, 20 nt, synthetic construct
  source 1..20: mol_type = other RNA
ttgggggttctgatacacta

SEQ ID NO: 1834 - RNA, 20 nt, synthetic construct
  source 1..20: mol_type = other RNA
cttgggggttctgatacact

SEQ ID NO: 1835 - RNA, 20 nt, synthetic construct
  source 1..20: mol_type = other RNA
ccttgggggttctgatacac

SEQ ID NO: 1836 - RNA, 20 nt, synthetic construct
  source 1..20: mol_type = other RNA
tccttgggggttctgataca

SEQ ID NO: 1837 - RNA, 20 nt, synthetic construct
  source 1..20: mol_type = other RNA
ctccttgggggttctgatac

SEQ ID NO: 1838 - RNA, 20 nt, synthetic construct
  source 1..20: mol_type = other RNA
actccttgggggttctgata

SEQ ID NO: 1839 - RNA, 20 nt, synthetic construct
  source 1..20: mol_type = other RNA
aactccttgggggttctgat

SEQ ID NO: 1840 - RNA, 20 nt, synthetic construct
  source 1..20: mol_type = other RNA
aaactccttgggggttctga

SEQ ID NO: 1841 - RNA, 20 nt, synthetic construct
  source 1..20: mol_type = other RNA
gaaactccttgggggttctg

SEQ ID NO: 1842 - RNA, 20 nt, synthetic construct
  source 1..20: mol_type = other RNA
tgaaactccttgggggttct

SEQ ID NO: 1843 - RNA, 20 nt, synthetic construct
  source 1..20: mol_type = other RNA
ctgaaactccttgggggttc

SEQ ID NO: 1844 - RNA, 20 nt, synthetic construct
  source 1..20: mol_type = other RNA
actgaaactccttgggggtt

SEQ ID NO: 1845 - RNA, 20 nt, synthetic construct
  source 1..20: mol_type = other RNA
tactgaaactccttgggggt

SEQ ID NO: 1846 - RNA, 20 nt, synthetic construct
  source 1..20: mol_type = other RNA
ttactgaaactccttggggg

SEQ ID NO: 1847 - RNA, 20 nt, synthetic construct
  source 1..20: mol_type = other RNA
cttactgaaactccttgggg

SEQ ID NO: 1848 - RNA, 20 nt, synthetic construct
  source 1..20: mol_type = other RNA
gcttactgaaactccttggg

SEQ ID NO: 1849 - RNA, 20 nt, synthetic construct
  source 1..20: mol_type = other RNA
cgcttactgaaactccttgg

SEQ ID NO: 1850 - RNA, 20 nt, synthetic construct
  source 1..20: mol_type = other RNA
ccgcttactgaaactccttg

SEQ ID NO: 1851 - RNA, 20 nt, synthetic construct
  source 1..20: mol_type = other RNA
accgcttactgaaactcctt

SEQ ID NO: 1852 - RNA, 20 nt, synthetic construct
  source 1..20: mol_type = other RNA
aaccgcttactgaaactcct

SEQ ID NO: 1853 - RNA, 20 nt, synthetic construct
  source 1..20: mol_type = other RNA
gaaccgcttactgaaactcc

SEQ ID NO: 1854 - RNA, 20 nt, synthetic construct
  source 1..20: mol_type = other RNA
agaaccgcttactgaaactc

SEQ ID NO: 1855 - RNA, 20 nt, synthetic construct
  source 1..20: mol_type = other RNA
aagaaccgcttactgaaact

SEQ ID NO: 1856 - RNA, 20 nt, synthetic construct
  source 1..20: mol_type = other RNA
gaagaaccgcttactgaaac

SEQ ID NO: 1857 - RNA, 20 nt, synthetic construct
  source 1..20: mol_type = other RNA
agaagaaccgcttactgaaa

SEQ ID NO: 1858 - RNA, 20 nt, synthetic construct
  source 1..20: mol_type = other RNA
cagaagaaccgcttactgaa

SEQ ID NO: 1859 - RNA, 20 nt, synthetic construct
  source 1..20: mol_type = other RNA
acagaagaaccgcttactga

SEQ ID NO: 1860 - RNA, 20 nt, synthetic construct
  source 1..20: mol_type = other RNA
aacagaagaaccgcttactg

SEQ ID NO: 1861 - RNA, 20 nt, synthetic construct
  source 1..20: mol_type = other RNA
caacagaagaaccgcttact

SEQ ID NO: 1862 - RNA, 20 nt, synthetic construct
  source 1..20: mol_type = other RNA
acaacagaagaaccgcttac

SEQ ID NO: 1863 - RNA, 20 nt, synthetic construct
  source 1..20: mol_type = other RNA
gacaacagaagaaccgctta

SEQ ID NO: 1864 - RNA, 20 nt, synthetic construct
  source 1..20: mol_type = other RNA
agacaacagaagaaccgctt

SEQ ID NO: 1865 - RNA, 20 nt, synthetic construct
  source 1..20: mol_type = other RNA
gagacaacagaagaaccgct

SEQ ID NO: 1866 - RNA, 20 nt, synthetic construct
  source 1..20: mol_type = other RNA
ggagacaacagaagaaccgc

SEQ ID NO: 1867 - RNA, 20 nt, synthetic construct
  source 1..20: mol_type = other RNA
cggagacaacagaagaaccg

SEQ ID NO: 1868 - RNA, 20 nt, synthetic construct
  source 1..20: mol_type = other RNA
ccggagacaacagaagaacc

SEQ ID NO: 1869 - RNA, 20 nt, synthetic construct
  source 1..20: mol_type = other RNA
gccggagacaacagaagaac

SEQ ID NO: 1870 - RNA, 20 nt, synthetic construct
  source 1..20: mol_type = other RNA
agccggagacaacagaagaa

SEQ ID NO: 1871 - RNA, 20 nt, synthetic construct
  source 1..20: mol_type = other RNA
cagccggagacaacagaaga

SEQ ID NO: 1872 - RNA, 20 nt, synthetic construct
  source 1..20: mol_type = other RNA
tcagccggagacaacagaag

SEQ ID NO: 1873 - RNA, 20 nt, synthetic construct
  source 1..20: mol_type = other RNA
ctcagccggagacaacagaa

SEQ ID NO: 1874 - RNA, 20 nt, synthetic construct
  source 1..20: mol_type = other RNA
tctcagccggagacaacaga

SEQ ID NO: 1875 - RNA, 20 nt, synthetic construct
  source 1..20: mol_type = other RNA
gtctcagccggagacaacag

SEQ ID NO: 1876 - RNA, 20 nt, synthetic construct
  source 1..20: mol_type = other RNA
agtctcagccggagacaaca

SEQ ID NO: 1877 - RNA, 20 nt, synthetic construct
  source 1..20: mol_type = other RNA
gagtctcagccggagacaac

SEQ ID NO: 1878 - RNA, 20 nt, synthetic construct
  source 1..20: mol_type = other RNA
ggagtctcagccggagacaa

SEQ ID NO: 1879 - RNA, 20 nt, synthetic construct
  source 1..20: mol_type = other RNA
tggagtctcagccggagaca

SEQ ID NO: 1880 - RNA, 20 nt, synthetic construct
  source 1..20: mol_type = other RNA
ctggagtctcagccggagac

SEQ ID NO: 1881 - RNA, 20 nt, synthetic construct
  source 1..20: mol_type = other RNA
cctggagtctcagccggaga

SEQ ID NO: 1882 - RNA, 20 nt, synthetic construct
  source 1..20: mol_type = other RNA
ccctggagtctcagccggag

SEQ ID NO: 1883 - RNA, 20 nt, synthetic construct
  source 1..20: mol_type = other RNA
cccctggagtctcagccgga

SEQ ID NO: 1884 - RNA, 20 nt, synthetic construct
  source 1..20: mol_type = other RNA
tcccctggagtctcagccgg

SEQ ID NO: 1885 - RNA, 20 nt, synthetic construct
  source 1..20: mol_type = other RNA
ttcccctggagtctcagccg

SEQ ID NO: 1886 - RNA, 20 nt, synthetic construct
  source 1..20: mol_type = other RNA
gttcccctggagtctcagcc

SEQ ID NO: 1887 - RNA, 20 nt, synthetic construct
  source 1..20: mol_type = other RNA
ggttcccctggagtctcagc

SEQ ID NO: 1888 - RNA, 20 nt, synthetic construct
  source 1..20: mol_type = other RNA
aggttcccctggagtctcag

SEQ ID NO: 1889 - RNA, 20 nt, synthetic construct
  source 1..20: mol_type = other RNA
gaggttcccctggagtctca

SEQ ID NO: 1890 - RNA, 20 nt, synthetic construct
  source 1..20: mol_type = other RNA
tgaggttcccctggagtctc

SEQ ID NO: 1891 - RNA, 20 nt, synthetic construct
  source 1..20: mol_type = other RNA
ttgaggttcccctggagtct

SEQ ID NO: 1892 - RNA, 20 nt, synthetic construct
  source 1..20: mol_type = other RNA
cttgaggttcccctggagtc

SEQ ID NO: 1893 - RNA, 20 nt, synthetic construct
  source 1..20: mol_type = other RNA
gcttgaggttcccctggagt

SEQ ID NO: 1894 - RNA, 20 nt, synthetic construct
  source 1..20: mol_type = other RNA
agcttgaggttcccctggag

SEQ ID NO: 1895 - RNA, 20 nt, synthetic construct
  source 1..20: mol_type = other RNA
gagcttgaggttcccctgga

SEQ ID NO: 1896 - RNA, 20 nt, synthetic construct
  source 1..20: mol_type = other RNA
tgagcttgaggttcccctgg

SEQ ID NO: 1897 - RNA, 20 nt, synthetic construct
  source 1..20: mol_type = other RNA
gtgagcttgaggttcccctg

SEQ ID NO: 1898 - RNA, 20 nt, synthetic construct
  source 1..20: mol_type = other RNA
tgtgagcttgaggttcccct

SEQ ID NO: 1899 - RNA, 20 nt, synthetic construct
  source 1..20: mol_type = other RNA
atgtgagcttgaggttcccc

SEQ ID NO: 1900 - RNA, 20 nt, synthetic construct
  source 1..20: mol_type = other RNA
catgtgagcttgaggttccc

SEQ ID NO: 1901 - RNA, 20 nt, synthetic construct
  source 1..20: mol_type = other RNA
ccatgtgagcttgaggttcc

SEQ ID NO: 1902 - RNA, 20 nt, synthetic construct
  source 1..20: mol_type = other RNA
gccatgtgagcttgaggttc

SEQ ID NO: 1903 - RNA, 20 nt, synthetic construct
  source 1..20: mol_type = other RNA
ggccatgtgagcttgaggtt

SEQ ID NO: 1904 - RNA, 20 nt, synthetic construct
  source 1..20: mol_type = other RNA
gggccatgtgagcttgaggt

SEQ ID NO: 1905 - RNA, 20 nt, synthetic construct
  source 1..20: mol_type = other RNA
agggccatgtgagcttgagg

SEQ ID NO: 1906 - RNA, 20 nt, synthetic construct
  source 1..20: mol_type = other RNA
cagggccatgtgagcttgag

SEQ ID NO: 1907 - RNA, 20 nt, synthetic construct
  source 1..20: mol_type = other RNA
ccagggccatgtgagcttga

SEQ ID NO: 1908 - RNA, 20 nt, synthetic construct
  source 1..20: mol_type = other RNA
gccagggccatgtgagcttg

SEQ ID NO: 1909 - RNA, 20 nt, synthetic construct
  source 1..20: mol_type = other RNA
cgccagggccatgtgagctt

SEQ ID NO: 1910 - RNA, 20 nt, synthetic construct
  source 1..20: mol_type = other RNA
ccgccagggccatgtgagct

SEQ ID NO: 1911 - RNA, 20 nt, synthetic construct
  source 1..20: mol_type = other RNA
cccgccagggccatgtgagc

SEQ ID NO: 1912 - RNA, 20 nt, synthetic construct
  source 1..20: mol_type = other RNA
gcccgccagggccatgtgag

SEQ ID NO: 1913 - RNA, 20 nt, synthetic construct
  source 1..20: mol_type = other RNA
ggcccgccagggccatgtga

SEQ ID NO: 1914 - RNA, 20 nt, synthetic construct
  source 1..20: mol_type = other RNA
gggcccgccagggccatgtg

SEQ ID NO: 1915 - RNA, 20 nt, synthetic construct
  source 1..20: mol_type = other RNA
ggggcccgccagggccatgt

SEQ ID NO: 1916 - RNA, 20 nt, synthetic construct
  source 1..20: mol_type = other RNA
aggggcccgccagggccatg

SEQ ID NO: 1917 - RNA, 20 nt, synthetic construct
  source 1..20: mol_type = other RNA
caggggcccgccagggccat

SEQ ID NO: 1918 - RNA, 20 nt, synthetic construct
  source 1..20: mol_type = other RNA
ccaggggcccgccagggcca

SEQ ID NO: 1919 - RNA, 20 nt, synthetic construct
  source 1..20: mol_type = other RNA
cccaggggcccgccagggcc

SEQ ID NO: 1920 - RNA, 20 nt, synthetic construct
  source 1..20: mol_type = other RNA
gcccaggggcccgccagggc

SEQ ID NO: 1921 - RNA, 20 nt, synthetic construct
  source 1..20: mol_type = other RNA
tgcccaggggcccgccaggg

SEQ ID NO: 1922 - RNA, 20 nt, synthetic construct
  source 1..20: mol_type = other RNA
ctgcccaggggcccgccagg

SEQ ID NO: 1923 - RNA, 20 nt, synthetic construct
  source 1..20: mol_type = other RNA
cctgcccaggggcccgccag

SEQ ID NO: 1924 - RNA, 20 nt, synthetic construct
  source 1..20: mol_type = other RNA
tcctgcccaggggcccgcca

SEQ ID NO: 1925 - RNA, 20 nt, synthetic construct
  source 1..20: mol_type = other RNA
ctcctgcccaggggcccgcc

SEQ ID NO: 1926 - RNA, 20 nt, synthetic construct
  source 1..20: mol_type = other RNA
gctcctgcccaggggcccgc

SEQ ID NO: 1927 - RNA, 20 nt, synthetic construct
  source 1..20: mol_type = other RNA
tgctcctgcccaggggcccg

SEQ ID NO: 1928 - RNA, 20 nt, synthetic construct
  source 1..20: mol_type = other RNA
ctgctcctgcccaggggccc

SEQ ID NO: 1929 - RNA, 20 nt, synthetic construct
  source 1..20: mol_type = other RNA
cctgctcctgcccaggggcc

SEQ ID NO: 1930 - RNA, 20 nt, synthetic construct
  source 1..20: mol_type = other RNA
gcctgctcctgcccaggggc

SEQ ID NO: 1931 - RNA, 20 nt, synthetic construct
  source 1..20: mol_type = other RNA
cgcctgctcctgcccagggg

SEQ ID NO: 1932 - RNA, 20 nt, synthetic construct
  source 1..20: mol_type = other RNA
tcgcctgctcctgcccaggg

SEQ ID NO: 1933 - RNA, 20 nt, synthetic construct
  source 1..20: mol_type = other RNA
ctcgcctgctcctgcccagg

SEQ ID NO: 1934 - RNA, 20 nt, synthetic construct
  source 1..20: mol_type = other RNA
tctcgcctgctcctgcccag

SEQ ID NO: 1935 - RNA, 20 nt, synthetic construct
  source 1..20: mol_type = other RNA
ctctcgcctgctcctgccca

SEQ ID NO: 1936 - RNA, 20 nt, synthetic construct
  source 1..20: mol_type = other RNA
cctctcgcctgctcctgccc

SEQ ID NO: 1937 - RNA, 20 nt, synthetic construct
  source 1..20: mol_type = other RNA
acctctcgcctgctcctgcc

SEQ ID NO: 1938 - RNA, 20 nt, synthetic construct
  source 1..20: mol_type = other RNA
gacctctcgcctgctcctgc

SEQ ID NO: 1939 - RNA, 20 nt, synthetic construct
  source 1..20: mol_type = other RNA
agacctctcgcctgctcctg

SEQ ID NO: 1940 - RNA, 20 nt, synthetic construct
  source 1..20: mol_type = other RNA
cagacctctcgcctgctcct

SEQ ID NO: 1941 - RNA, 20 nt, synthetic construct
  source 1..20: mol_type = other RNA
gcagacctctcgcctgctcc

SEQ ID NO: 1942 - RNA, 20 nt, synthetic construct
  source 1..20: mol_type = other RNA
cgcagacctctcgcctgctc

SEQ ID NO: 1943 - RNA, 20 nt, synthetic construct
  source 1..20: mol_type = other RNA
gcgcagacctctcgcctgct

SEQ ID NO: 1944 - RNA, 20 nt, synthetic construct
  source 1..20: mol_type = other RNA
cgcgcagacctctcgcctgc

SEQ ID NO: 1945 - RNA, 20 nt, synthetic construct
  source 1..20: mol_type = other RNA
ccgcgcagacctctcgcctg

SEQ ID NO: 1946 - RNA, 20 nt, synthetic construct
  source 1..20: mol_type = other RNA
gccgcgcagacctctcgcct

SEQ ID NO: 1947 - RNA, 20 nt, synthetic construct
  source 1..20: mol_type = other RNA
ggccgcgcagacctctcgcc

SEQ ID NO: 1948 - RNA, 20 nt, synthetic construct
  source 1..20: mol_type = other RNA
cggccgcgcagacctctcgc

SEQ ID NO: 1949 - RNA, 20 nt, synthetic construct
  source 1..20: mol_type = other RNA
gcggccgcgcagacctctcg

SEQ ID NO: 1950 - RNA, 20 nt, synthetic construct
  source 1..20: mol_type = other RNA
agcggccgcgcagacctctc

SEQ ID NO: 1951 - RNA, 20 nt, synthetic construct
  source 1..20: mol_type = other RNA
gagcggccgcgcagacctct

SEQ ID NO: 1952 - RNA, 20 nt, synthetic construct
  source 1..20: mol_type = other RNA
agagcggccgcgcagacctc

SEQ ID NO: 1953 - RNA, 20 nt, synthetic construct
  source 1..20: mol_type = other RNA
gagagcggccgcgcagacct

SEQ ID NO: 1954 - RNA, 20 nt, synthetic construct
  source 1..20: mol_type = other RNA
ggagagcggccgcgcagacc

SEQ ID NO: 1955 - RNA, 20 nt, synthetic construct
  source 1..20: mol_type = other RNA
aggagagcggccgcgcagac

SEQ ID NO: 1956 - RNA, 20 nt, synthetic construct
  source 1..20: mol_type = other RNA
taggagagcggccgcgcaga

SEQ ID NO: 1957 - RNA, 20 nt, synthetic construct
  source 1..20: mol_type = other RNA
gtaggagagcggccgcgcag

SEQ ID NO: 1958 - RNA, 20 nt, synthetic construct
  source 1..20: mol_type = other RNA
ggtaggagagcggccgcgca

SEQ ID NO: 1959 - RNA, 20 nt, synthetic construct
  source 1..20: mol_type = other RNA
aggtaggagagcggccgcgc

SEQ ID NO: 1960 - RNA, 20 nt, synthetic construct
  source 1..20: mol_type = other RNA
caggtaggagagcggccgcg

SEQ ID NO: 1961 - RNA, 20 nt, synthetic construct
  source 1..20: mol_type = other RNA
gcaggtaggagagcggccgc

SEQ ID NO: 1962 - RNA, 20 nt, synthetic construct
  source 1..20: mol_type = other RNA
cgcaggtaggagagcggccg

SEQ ID NO: 1963 - RNA, 20 nt, synthetic construct
  source 1..20: mol_type = other RNA
acgcaggtaggagagcggcc

SEQ ID NO: 1964 - RNA, 20 nt, synthetic construct
  source 1..20: mol_type = other RNA
gacgcaggtaggagagcggc

SEQ ID NO: 1965 - RNA, 20 nt, synthetic construct
  source 1..20: mol_type = other RNA
ggacgcaggtaggagagcgg

SEQ ID NO: 1966 - RNA, 20 nt, synthetic construct
  source 1..20: mol_type = other RNA
cggacgcaggtaggagagcg

SEQ ID NO: 1967 - RNA, 20 nt, synthetic construct
  source 1..20: mol_type = other RNA
tcggacgcaggtaggagagc

SEQ ID NO: 1968 - RNA, 20 nt, synthetic construct
  source 1..20: mol_type = other RNA
gtcggacgcaggtaggagag

SEQ ID NO: 1969 - RNA, 20 nt, synthetic construct
  source 1..20: mol_type = other RNA
agtcggacgcaggtaggaga

SEQ ID NO: 1970 - RNA, 20 nt, synthetic construct
  source 1..20: mol_type = other RNA
gagtcggacgcaggtaggag

SEQ ID NO: 1971 - RNA, 20 nt, synthetic construct
  source 1..20: mol_type = other RNA
ggagtcggacgcaggtagga

SEQ ID NO: 1972 - RNA, 20 nt, synthetic construct
  source 1..20: mol_type = other RNA
cggagtcggacgcaggtagg

SEQ ID NO: 1973 - RNA, 20 nt, synthetic construct
  source 1..20: mol_type = other RNA
gcggagtcggacgcaggtag

SEQ ID NO: 1974 - RNA, 20 nt, synthetic construct
  source 1..20: mol_type = other RNA
cgcggagtcggacgcaggta

SEQ ID NO: 1975 - RNA, 20 nt, synthetic construct
  source 1..20: mol_type = other RNA
ccgcggagtcggacgcaggt

SEQ ID NO: 1976 - RNA, 20 nt, synthetic construct
  source 1..20: mol_type = other RNA
accgcggagtcggacgcagg

SEQ ID NO: 1977 - RNA, 20 nt, synthetic construct
  source 1..20: mol_type = other RNA
gaccgcggagtcggacgcag

SEQ ID NO: 1978 - RNA, 20 nt, synthetic construct
  source 1..20: mol_type = other RNA
ggaccgcggagtcggacgca

SEQ ID NO: 1979 - RNA, 20 nt, synthetic construct
  source 1..20: mol_type = other RNA
aggaccgcggagtcggacgc

SEQ ID NO: 1980 - RNA, 20 nt, synthetic construct
  source 1..20: mol_type = other RNA
aaggaccgcggagtcggacg

SEQ ID NO: 1981 - RNA, 20 nt, synthetic construct
  source 1..20: mol_type = other RNA
caaggaccgcggagtcggac

SEQ ID NO: 1982 - RNA, 20 nt, synthetic construct
  source 1..20: mol_type = other RNA
ccaaggaccgcggagtcgga

SEQ ID NO: 1983 - RNA, 20 nt, synthetic construct
  source 1..20: mol_type = other RNA
cccaaggaccgcggagtcgg

SEQ ID NO: 1984 - RNA, 20 nt, synthetic construct
  source 1..20: mol_type = other RNA
gcccaaggaccgcggagtcg

SEQ ID NO: 1985 - RNA, 20 nt, synthetic construct
  source 1..20: mol_type = other RNA
tgcccaaggaccgcggagtc

SEQ ID NO: 1986 - RNA, 20 nt, synthetic construct
  source 1..20: mol_type = other RNA
ctgcccaaggaccgcggagt

SEQ ID NO: 1987 - RNA, 20 nt, synthetic construct
  source 1..20: mol_type = other RNA
gctgcccaaggaccgcggag

SEQ ID NO: 1988 - RNA, 20 nt, synthetic construct
  source 1..20: mol_type = other RNA
tgctgcccaaggaccgcgga

SEQ ID NO: 1989 - RNA, 20 nt, synthetic construct
  source 1..20: mol_type = other RNA
ctgctgcccaaggaccgcgg

SEQ ID NO: 1990 - RNA, 20 nt, synthetic construct
  source 1..20: mol_type = other RNA
gctgctgcccaaggaccgcg

SEQ ID NO: 1991 - RNA, 20 nt, synthetic construct
  source 1..20: mol_type = other RNA
tgctgctgcccaaggaccgc

SEQ ID NO: 1992 - RNA, 20 nt, synthetic construct
  source 1..20: mol_type = other RNA
ttgctgctgcccaaggaccg

SEQ ID NO: 1993 - RNA, 20 nt, synthetic construct
  source 1..20: mol_type = other RNA
gttgctgctgcccaaggacc

SEQ ID NO: 1994 - RNA, 20 nt, synthetic construct
  source 1..20: mol_type = other RNA
ggttgctgctgcccaaggac

SEQ ID NO: 1995 - RNA, 20 nt, synthetic construct
  source 1..20: mol_type = other RNA
cggttgctgctgcccaagga

SEQ ID NO: 1996 - RNA, 20 nt, synthetic construct
  source 1..20: mol_type = other RNA
ccggttgctgctgcccaagg

SEQ ID NO: 1997 - RNA, 20 nt, synthetic construct
  source 1..20: mol_type = other RNA
cccggttgctgctgcccaag

SEQ ID NO: 1998 - RNA, 20 nt, synthetic construct
  source 1..20: mol_type = other RNA
acccggttgctgctgcccaa

SEQ ID NO: 1999 - RNA, 20 nt, synthetic construct
  source 1..20: mol_type = other RNA
tacccggttgctgctgccca

SEQ ID NO: 2000 - RNA, 20 nt, synthetic construct
  source 1..20: mol_type = other RNA
ctacccggttgctgctgccc

SEQ ID NO: 2001 - RNA, 20 nt, synthetic construct
  source 1..20: mol_type = other RNA
gctacccggttgctgctgcc

SEQ ID NO: 2002 - RNA, 20 nt, synthetic construct
  source 1..20: mol_type = other RNA
cgctacccggttgctgctgc

SEQ ID NO: 2003 - RNA, 20 nt, synthetic construct
  source 1..20: mol_type = other RNA
gcgctacccggttgctgctg

SEQ ID NO: 2004 - RNA, 20 nt, synthetic construct
  source 1..20: mol_type = other RNA
agcgctacccggttgctgct

SEQ ID NO: 2005 - RNA, 20 nt, synthetic construct
  source 1..20: mol_type = other RNA
gagcgctacccggttgctgc

SEQ ID NO: 2006 - RNA, 20 nt, synthetic construct
  source 1..20: mol_type = other RNA
tgagcgctacccggttgctg

SEQ ID NO: 2007 - RNA, 20 nt, synthetic construct
  source 1..20: mol_type = other RNA
ctgagcgctacccggttgct

SEQ ID NO: 2008 - RNA, 20 nt, synthetic construct
  source 1..20: mol_type = other RNA
tctgagcgctacccggttgc

SEQ ID NO: 2009 - RNA, 20 nt, synthetic construct
  source 1..20: mol_type = other RNA
gtctgagcgctacccggttg

SEQ ID NO: 2010 - RNA, 20 nt, synthetic construct
  source 1..20: mol_type = other RNA
agtctgagcgctacccggtt

SEQ ID NO: 2011 - RNA, 20 nt, synthetic construct
  source 1..20: mol_type = other RNA
tagtctgagcgctacccggt

SEQ ID NO: 2012 - RNA, 20 nt, synthetic construct
  source 1..20: mol_type = other RNA
gtagtctgagcgctacccgg

SEQ ID NO: 2013 - RNA, 20 nt, synthetic construct
  source 1..20: mol_type = other RNA
tgtagtctgagcgctacccg

SEQ ID NO: 2014 - RNA, 20 nt, synthetic construct
  source 1..20: mol_type = other RNA
ctgtagtctgagcgctaccc

SEQ ID NO: 2015 - RNA, 20 nt, synthetic construct
  source 1..20: mol_type = other RNA
tctgtagtctgagcgctacc

SEQ ID NO: 2016 - RNA, 20 nt, synthetic construct
  source 1..20: mol_type = other RNA
gtctgtagtctgagcgctac

SEQ ID NO: 2017 - RNA, 20 nt, synthetic construct
  source 1..20: mol_type = other RNA
ggtctgtagtctgagcgcta

SEQ ID NO: 2018 - RNA, 20 nt, synthetic construct
  source 1..20: mol_type = other RNA
gggtctgtagtctgagcgct

SEQ ID NO: 2019 - RNA, 20 nt, synthetic construct
  source 1..20: mol_type = other RNA
ggggtctgtagtctgagcgc

SEQ ID NO: 2020 - RNA, 20 nt, synthetic construct
  source 1..20: mol_type = other RNA
tggggtctgtagtctgagcg

SEQ ID NO: 2021 - RNA, 20 nt, synthetic construct
  source 1..20: mol_type = other RNA
ctggggtctgtagtctgagc

SEQ ID NO: 2022 - RNA, 20 nt, synthetic construct
  source 1..20: mol_type = other RNA
gctggggtctgtagtctgag

SEQ ID NO: 2023 - RNA, 20 nt, synthetic construct
  source 1..20: mol_type = other RNA
cgctggggtctgtagtctga

SEQ ID NO: 2024 - RNA, 20 nt, synthetic construct
  source 1..20: mol_type = other RNA
gcgctggggtctgtagtctg

SEQ ID NO: 2025 - RNA, 20 nt, synthetic construct
  source 1..20: mol_type = other RNA
cgcgctggggtctgtagtct

SEQ ID NO: 2026 - RNA, 20 nt, synthetic construct
  source 1..20: mol_type = other RNA
tcgcgctggggtctgtagtc

SEQ ID NO: 2027 - RNA, 20 nt, synthetic construct
  source 1..20: mol_type = other RNA
atcgcgctggggtctgtagt

SEQ ID NO: 2028 - RNA, 20 nt, synthetic construct
  source 1..20: mol_type = other RNA
catcgcgctggggtctgtag

SEQ ID NO: 2029 - RNA, 20 nt, synthetic construct
  source 1..20: mol_type = other RNA
tcatcgcgctggggtctgta

SEQ ID NO: 2030 - RNA, 20 nt, synthetic construct
  source 1..20: mol_type = other RNA
gtcatcgcgctggggtctgt

SEQ ID NO: 2031 - RNA, 20 nt, synthetic construct
  source 1..20: mol_type = other RNA
ggtcatcgcgctggggtctg

SEQ ID NO: 2032 - RNA, 20 nt, synthetic construct
  source 1..20: mol_type = other RNA
gggtcatcgcgctggggtct

SEQ ID NO: 2033 - RNA, 20 nt, synthetic construct
  source 1..20: mol_type = other RNA
cgggtcatcgcgctggggtc

SEQ ID NO: 2034 - RNA, 20 nt, synthetic construct
  source 1..20: mol_type = other RNA
gcgggtcatcgcgctggggt

SEQ ID NO: 2035 - RNA, 20 nt, synthetic construct
  source 1..20: mol_type = other RNA
ggcgggtcatcgcgctgggg

SEQ ID NO: 2036 - RNA, 20 nt, synthetic construct
  source 1..20: mol_type = other RNA
aggcgggtcatcgcgctggg

SEQ ID NO: 2037 - RNA, 20 nt, synthetic construct
  source 1..20: mol_type = other RNA
taggcgggtcatcgcgctgg

SEQ ID NO: 2038 - RNA, 20 nt, synthetic construct
  source 1..20: mol_type = other RNA
gtaggcgggtcatcgcgctg

SEQ ID NO: 2039 - RNA, 20 nt, synthetic construct
  source 1..20: mol_type = other RNA
ggtaggcgggtcatcgcgct

SEQ ID NO: 2040 - RNA, 20 nt, synthetic construct
  source 1..20: mol_type = other RNA
aggtaggcgggtcatcgcgc

SEQ ID NO: 2041 - RNA, 20 nt, synthetic construct
  source 1..20: mol_type = other RNA
gaggtaggcgggtcatcgcg

SEQ ID NO: 2042 - RNA, 20 nt, synthetic construct
  source 1..20: mol_type = other RNA
tgaggtaggcgggtcatcgc

SEQ ID NO: 2043 - RNA, 20 nt, synthetic construct
  source 1..20: mol_type = other RNA
ctgaggtaggcgggtcatcg

SEQ ID NO: 2044 - RNA, 20 nt, synthetic construct
  source 1..20: mol_type = other RNA
actgaggtaggcgggtcatc

SEQ ID NO: 2045 - RNA, 20 nt, synthetic construct
  source 1..20: mol_type = other RNA
aactgaggtaggcgggtcat

SEQ ID NO: 2046 - RNA, 20 nt, synthetic construct
  source 1..20: mol_type = other RNA
aaactgaggtaggcgggtca

SEQ ID NO: 2047 - RNA, 20 nt, synthetic construct
  source 1..20: mol_type = other RNA
gaaactgaggtaggcgggtc

SEQ ID NO: 2048 - RNA, 20 nt, synthetic construct
  source 1..20: mol_type = other RNA
ggaaactgaggtaggcgggt

SEQ ID NO: 2049 - RNA, 20 nt, synthetic construct
  source 1..20: mol_type = other RNA
tggaaactgaggtaggcggg

SEQ ID NO: 2050 - RNA, 20 nt, synthetic construct
  source 1..20: mol_type = other RNA
atggaaactgaggtaggcgg

SEQ ID NO: 2051 - RNA, 20 nt, synthetic construct
  source 1..20: mol_type = other RNA
aatggaaactgaggtaggcg

SEQ ID NO: 2052 - RNA, 20 nt, synthetic construct
  source 1..20: mol_type = other RNA
caatggaaactgaggtaggc

SEQ ID NO: 2053 - RNA, 20 nt, synthetic construct
  source 1..20: mol_type = other RNA
ccaatggaaactgaggtagg

SEQ ID NO: 2054 - RNA, 20 nt, synthetic construct
  source 1..20: mol_type = other RNA
gccaatggaaactgaggtag

SEQ ID NO: 2055 - RNA, 20 nt, synthetic construct
  source 1..20: mol_type = other RNA
ggccaatggaaactgaggta

SEQ ID NO: 2056 - RNA, 20 nt, synthetic construct
  source 1..20: mol_type = other RNA
tggccaatggaaactgaggt

SEQ ID NO: 2057 - RNA, 20 nt, synthetic construct
  source 1..20: mol_type = other RNA
ctggccaatggaaactgagg

SEQ ID NO: 2058 - RNA, 20 nt, synthetic construct
  source 1..20: mol_type = other RNA
cctggccaatggaaactgag

SEQ ID NO: 2059 - RNA, 20 nt, synthetic construct
  source 1..20: mol_type = other RNA
ccctggccaatggaaactga

SEQ ID NO: 2060 - RNA, 20 nt, synthetic construct
  source 1..20: mol_type = other RNA
tccctggccaatggaaactg

SEQ ID NO: 2061 - RNA, 20 nt, synthetic construct
  source 1..20: mol_type = other RNA
atccctggccaatggaaact

SEQ ID NO: 2062 - RNA, 20 nt, synthetic construct
  source 1..20: mol_type = other RNA
gatccctggccaatggaaac

SEQ ID NO: 2063 - RNA, 20 nt, synthetic construct
  source 1..20: mol_type = other RNA
tgatccctggccaatggaaa

SEQ ID NO: 2064 - RNA, 20 nt, synthetic construct
  source 1..20: mol_type = other RNA
ctgatccctggccaatggaa

SEQ ID NO: 2065 - RNA, 20 nt, synthetic construct
  source 1..20: mol_type = other RNA
cctgatccctggccaatgga

SEQ ID NO: 2066 - RNA, 20 nt, synthetic construct
  source 1..20: mol_type = other RNA
ccctgatccctggccaatgg

SEQ ID NO: 2067 - RNA, 20 nt, synthetic construct
  source 1..20: mol_type = other RNA
gccctgatccctggccaatg

SEQ ID NO: 2068 - RNA, 20 nt, synthetic construct
  source 1..20: mol_type = other RNA
agccctgatccctggccaat

SEQ ID NO: 2069 - RNA, 20 nt, synthetic construct
  source 1..20: mol_type = other RNA
tagccctgatccctggccaa

SEQ ID NO: 2070 - RNA, 20 nt, synthetic construct
  source 1..20: mol_type = other RNA
gtagccctgatccctggcca

SEQ ID NO: 2071 - RNA, 20 nt, synthetic construct
  source 1..20: mol_type = other RNA
ggtagccctgatccctggcc

SEQ ID NO: 2072 - RNA, 20 nt, synthetic construct
  source 1..20: mol_type = other RNA
gggtagccctgatccctggc

SEQ ID NO: 2073 - RNA, 20 nt, synthetic construct
  source 1..20: mol_type = other RNA
cgggtagccctgatccctgg

SEQ ID NO: 2074 - RNA, 20 nt, synthetic construct
  source 1..20: mol_type = other RNA
gcgggtagccctgatccctg

SEQ ID NO: 2075 - RNA, 20 nt, synthetic construct
  source 1..20: mol_type = other RNA
agcgggtagccctgatccct

SEQ ID NO: 2076 - RNA, 20 nt, synthetic construct
  source 1..20: mol_type = other RNA
gagcgggtagccctgatccc

SEQ ID NO: 2077 - RNA, 20 nt, synthetic construct
  source 1..20: mol_type = other RNA
ggagcgggtagccctgatcc

SEQ ID NO: 2078 - RNA, 20 nt, synthetic construct
  source 1..20: mol_type = other RNA
gggagcgggtagccctgatc

SEQ ID NO: 2079 - RNA, 20 nt, synthetic construct
  source 1..20: mol_type = other RNA
tgggagcgggtagccctgat

SEQ ID NO: 2080 - RNA, 20 nt, synthetic construct
  source 1..20: mol_type = other RNA
atgggagcgggtagccctga

SEQ ID NO: 2081 - RNA, 20 nt, synthetic construct
  source 1..20: mol_type = other RNA
aatgggagcgggtagccctg

SEQ ID NO: 2082 - RNA, 20 nt, synthetic construct
  source 1..20: mol_type = other RNA
caatgggagcgggtagccct

SEQ ID NO: 2083 - RNA, 20 nt, synthetic construct
  source 1..20: mol_type = other RNA
ccaatgggagcgggtagccc

SEQ ID NO: 2084 - RNA, 20 nt, synthetic construct
  source 1..20: mol_type = other RNA
gccaatgggagcgggtagcc

SEQ ID NO: 2085 - RNA, 20 nt, synthetic construct
  source 1..20: mol_type = other RNA
agccaatgggagcgggtagc

SEQ ID NO: 2086 - RNA, 20 nt, synthetic construct
  source 1..20: mol_type = other RNA
tagccaatgggagcgggtag

SEQ ID NO: 2087 - RNA, 20 nt, synthetic construct
  source 1..20: mol_type = other RNA
gtagccaatgggagcgggta

SEQ ID NO: 2088 - RNA, 20 nt, synthetic construct
  source 1..20: mol_type = other RNA
agtagccaatgggagcgggt

SEQ ID NO: 2089 - RNA, 20 nt, synthetic construct
  source 1..20: mol_type = other RNA
aagtagccaatgggagcggg

SEQ ID NO: 2090 - RNA, 20 nt, synthetic construct
  source 1..20: mol_type = other RNA
taagtagccaatgggagcgg

SEQ ID NO: 2091 - RNA, 20 nt, synthetic construct
  source 1..20: mol_type = other RNA
ataagtagccaatgggagcg

SEQ ID NO: 2092 - RNA, 20 nt, synthetic construct
  source 1..20: mol_type = other RNA
gataagtagccaatgggagc

SEQ ID NO: 2093 - RNA, 20 nt, synthetic construct
  source 1..20: mol_type = other RNA
tgataagtagccaatgggag

SEQ ID NO: 2094 - RNA, 20 nt, synthetic construct
  source 1..20: mol_type = other RNA
ttgataagtagccaatggga

SEQ ID NO: 2095 - RNA, 20 nt, synthetic construct
  source 1..20: mol_type = other RNA
attgataagtagccaatggg

SEQ ID NO: 2096 - RNA, 20 nt, synthetic construct
  source 1..20: mol_type = other RNA
tattgataagtagccaatgg

SEQ ID NO: 2097 - RNA, 20 nt, synthetic construct
  source 1..20: mol_type = other RNA
atattgataagtagccaatg

SEQ ID NO: 2098 - RNA, 20 nt, synthetic construct
  source 1..20: mol_type = other RNA
tatattgataagtagccaat

SEQ ID NO: 2099 - RNA, 20 nt, synthetic construct
  source 1..20: mol_type = other RNA
ctatattgataagtagccaa

SEQ ID NO: 2100 - RNA, 20 nt, synthetic construct
  source 1..20: mol_type = other RNA
tctatattgataagtagcca

SEQ ID NO: 2101 - RNA, 20 nt, synthetic construct
  source 1..20: mol_type = other RNA
ctctatattgataagtagcc

SEQ ID NO: 2102 - RNA, 20 nt, synthetic construct
  source 1..20: mol_type = other RNA
cctctatattgataagtagc

SEQ ID NO: 2103 - RNA, 20 nt, synthetic construct
  source 1..20: mol_type = other RNA
acctctatattgataagtag

SEQ ID NO: 2104 - RNA, 20 nt, synthetic construct
  source 1..20: mol_type = other RNA
cacctctatattgataagta

SEQ ID NO: 2105 - RNA, 20 nt, synthetic construct
  source 1..20: mol_type = other RNA
ccacctctatattgataagt

SEQ ID NO: 2106 - RNA, 20 nt, synthetic construct
  source 1..20: mol_type = other RNA
cccacctctatattgataag

SEQ ID NO: 2107 - RNA, 20 nt, synthetic construct
  source 1..20: mol_type = other RNA
ccccacctctatattgataa

SEQ ID NO: 2108 - RNA, 20 nt, synthetic construct
  source 1..20: mol_type = other RNA
gccccacctctatattgata

SEQ ID NO: 2109 - RNA, 20 nt, synthetic construct
  source 1..20: mol_type = other RNA
ggccccacctctatattgat

SEQ ID NO: 2110 - RNA, 20 nt, synthetic construct
  source 1..20: mol_type = other RNA
tggccccacctctatattga

SEQ ID NO: 2111 - RNA, 20 nt, synthetic construct
  source 1..20: mol_type = other RNA
ctggccccacctctatattg

SEQ ID NO: 2112 - RNA, 20 nt, synthetic construct
  source 1..20: mol_type = other RNA
gctggccccacctctatatt

SEQ ID NO: 2113 - RNA, 20 nt, synthetic construct
  source 1..20: mol_type = other RNA
ggctggccccacctctatat

SEQ ID NO: 2114 - RNA, 20 nt, synthetic construct
  source 1..20: mol_type = other RNA
aggctggccccacctctata

SEQ ID NO: 2115 - RNA, 20 nt, synthetic construct
  source 1..20: mol_type = other RNA
caggctggccccacctctat

SEQ ID NO: 2116 - RNA, 20 nt, synthetic construct
  source 1..20: mol_type = other RNA
ccaggctggccccacctcta

SEQ ID NO: 2117 - RNA, 20 nt, synthetic construct
  source 1..20: mol_type = other RNA
tccaggctggccccacctct

SEQ ID NO: 2118 - RNA, 20 nt, synthetic construct
  source 1..20: mol_type = other RNA
ttccaggctggccccacctc

SEQ ID NO: 2119 - RNA, 20 nt, synthetic construct
  source 1..20: mol_type = other RNA
attccaggctggccccacct

SEQ ID NO: 2120 - RNA, 20 nt, synthetic construct
  source 1..20: mol_type = other RNA
cattccaggctggccccacc

SEQ ID NO: 2121 - RNA, 20 nt, synthetic construct
  source 1..20: mol_type = other RNA
gcattccaggctggccccac

SEQ ID NO: 2122 - RNA, 20 nt, synthetic construct
  source 1..20: mol_type = other RNA
agcattccaggctggcccca

SEQ ID NO: 2123 - RNA, 20 nt, synthetic construct
  source 1..20: mol_type = other RNA
cagcattccaggctggcccc

SEQ ID NO: 2124 - RNA, 20 nt, synthetic construct
  source 1..20: mol_type = other RNA
acagcattccaggctggccc

SEQ ID NO: 2125 - RNA, 20 nt, synthetic construct
  source 1..20: mol_type = other RNA
cacagcattccaggctggcc

SEQ ID NO: 2126 - RNA, 20 nt, synthetic construct
  source 1..20: mol_type = other RNA
acacagcattccaggctggc

SEQ ID NO: 2127 - RNA, 20 nt, synthetic construct
  source 1..20: mol_type = other RNA
aacacagcattccaggctgg

SEQ ID NO: 2128 - RNA, 20 nt, synthetic construct
  source 1..20: mol_type = other RNA
aaacacagcattccaggctg

SEQ ID NO: 2129 - RNA, 20 nt, synthetic construct
  source 1..20: mol_type = other RNA
gaaacacagcattccaggct

SEQ ID NO: 2130 - RNA, 20 nt, synthetic construct
  source 1..20: mol_type = other RNA
agaaacacagcattccaggc

SEQ ID NO: 2131 - RNA, 20 nt, synthetic construct
  source 1..20: mol_type = other RNA
aagaaacacagcattccagg

SEQ ID NO: 2132 - RNA, 20 nt, synthetic construct
  source 1..20: mol_type = other RNA
aaagaaacacagcattccag

SEQ ID NO: 2133 - RNA, 20 nt, synthetic construct
  source 1..20: mol_type = other RNA
aaaagaaacacagcattcca

SEQ ID NO: 2134 - RNA, 20 nt, synthetic construct
  source 1..20: mol_type = other RNA
gaaaagaaacacagcattcc

SEQ ID NO: 2135 - RNA, 20 nt, synthetic construct
  source 1..20: mol_type = other RNA
agaaaagaaacacagcattc

SEQ ID NO: 2136 - RNA, 20 nt, synthetic construct
  source 1..20: mol_type = other RNA
tagaaaagaaacacagcatt

SEQ ID NO: 2137 - RNA, 20 nt, synthetic construct
  source 1..20: mol_type = other RNA
gtagaaaagaaacacagcat

SEQ ID NO: 2138 - RNA, 20 nt, synthetic construct
  source 1..20: mol_type = other RNA
agtagaaaagaaacacagca

SEQ ID NO: 2139 - RNA, 20 nt, synthetic construct
  source 1..20: mol_type = other RNA
gagtagaaaagaaacacagc

SEQ ID NO: 2140 - RNA, 20 nt, synthetic construct
  source 1..20: mol_type = other RNA
tgagtagaaaagaaacacag

SEQ ID NO: 2141 - RNA, 20 nt, synthetic construct
  source 1..20: mol_type = other RNA
ttgagtagaaaagaaacaca

SEQ ID NO: 2142 - RNA, 20 nt, synthetic construct
  source 1..20: mol_type = other RNA
tttgagtagaaaagaaacac

SEQ ID NO: 2143 - RNA, 20 nt, synthetic construct
  source 1..20: mol_type = other RNA
atttgagtagaaaagaaaca

SEQ ID NO: 2144 - RNA, 20 nt, synthetic construct
  source 1..20: mol_type = other RNA
gatttgagtagaaaagaaac

SEQ ID NO: 2145 - RNA, 20 nt, synthetic construct
  source 1..20: mol_type = other RNA
tgatttgagtagaaaagaaa

SEQ ID NO: 2146 - RNA, 20 nt, synthetic construct
  source 1..20: mol_type = other RNA
gtgatttgagtagaaaagaa

SEQ ID NO: 2147 - RNA, 20 nt, synthetic construct
  source 1..20: mol_type = other RNA
agtgatttgagtagaaaaga

SEQ ID NO: 2148 - RNA, 20 nt, synthetic construct
  source 1..20: mol_type = other RNA
gagtgatttgagtagaaaag

SEQ ID NO: 2149 - RNA, 20 nt, synthetic construct
  source 1..20: mol_type = other RNA
agagtgatttgagtagaaaa

SEQ ID NO: 2150 - RNA, 20 nt, synthetic construct
  source 1..20: mol_type = other RNA
gagagtgatttgagtagaaa

SEQ ID NO: 2151 - RNA, 20 nt, synthetic construct
  source 1..20: mol_type = other RNA
ggagagtgatttgagtagaa

SEQ ID NO: 2152 - RNA, 20 nt, synthetic construct
  source 1..20: mol_type = other RNA
aggagagtgatttgagtaga

SEQ ID NO: 2153 - RNA, 20 nt, synthetic construct
  source 1..20: mol_type = other RNA
gaggagagtgatttgagtag

SEQ ID NO: 2154 - RNA, 20 nt, synthetic construct
  source 1..20: mol_type = other RNA
ggaggagagtgatttgagta

SEQ ID NO: 2155 - RNA, 20 nt, synthetic construct
  source 1..20: mol_type = other RNA
gggaggagagtgatttgagt

SEQ ID NO: 2156 - RNA, 20 nt, synthetic construct
  source 1..20: mol_type = other RNA
agggaggagagtgatttgag

SEQ ID NO: 2157 - RNA, 20 nt, synthetic construct
  source 1..20: mol_type = other RNA
cagggaggagagtgatttga

SEQ ID NO: 2158 - RNA, 20 nt, synthetic construct
  source 1..20: mol_type = other RNA
gcagggaggagagtgatttg

SEQ ID NO: 2159 - RNA, 20 nt, synthetic construct
  source 1..20: mol_type = other RNA
agcagggaggagagtgattt

SEQ ID NO: 2160 - RNA, 20 nt, synthetic construct
  source 1..20: mol_type = other RNA
aagcagggaggagagtgatt

SEQ ID NO: 2161 - RNA, 20 nt, synthetic construct
  source 1..20: mol_type = other RNA
gaagcagggaggagagtgat

SEQ ID NO: 2162 - RNA, 20 nt, synthetic construct
  source 1..20: mol_type = other RNA
ggaagcagggaggagagtga

SEQ ID NO: 2163 - RNA, 20 nt, synthetic construct
  source 1..20: mol_type = other RNA
aggaagcagggaggagagtg

SEQ ID NO: 2164 - RNA, 20 nt, synthetic construct
  source 1..20: mol_type = other RNA
gaggaagcagggaggagagt

SEQ ID NO: 2165 - RNA, 20 nt, synthetic construct
  source 1..20: mol_type = other RNA
agaggaagcagggaggagag

SEQ ID NO: 2166 - RNA, 20 nt, synthetic construct
  source 1..20: mol_type = other RNA
gagaggaagcagggaggaga

SEQ ID NO: 2167 - RNA, 20 nt, synthetic construct
  source 1..20: mol_type = other RNA
cgagaggaagcagggaggag

SEQ ID NO: 2168 - RNA, 20 nt, synthetic construct
  source 1..20: mol_type = other RNA
gcgagaggaagcagggagga

SEQ ID NO: 2169 - RNA, 20 nt, synthetic construct
  source 1..20: mol_type = other RNA
ggcgagaggaagcagggagg

SEQ ID NO: 2170 - RNA, 20 nt, synthetic construct
  source 1..20: mol_type = other RNA
gggcgagaggaagcagggag

SEQ ID NO: 2171 - RNA, 20 nt, synthetic construct
  source 1..20: mol_type = other RNA
ggggcgagaggaagcaggga

SEQ ID NO: 2172 - RNA, 20 nt, synthetic construct
  source 1..20: mol_type = other RNA
tggggcgagaggaagcaggg

SEQ ID NO: 2173 - RNA, 20 nt, synthetic construct
  source 1..20: mol_type = other RNA
gtggggcgagaggaagcagg

SEQ ID NO: 2174 - RNA, 20 nt, synthetic construct
  source 1..20: mol_type = other RNA
tgtggggcgagaggaagcag

SEQ ID NO: 2175 - RNA, 20 nt, synthetic construct
  source 1..20: mol_type = other RNA
gtgtggggcgagaggaagca

SEQ ID NO: 2176 - RNA, 20 nt, synthetic construct
  source 1..20: mol_type = other RNA
ggtgtggggcgagaggaagc

SEQ ID NO: 2177 - RNA, 20 nt, synthetic construct
  source 1..20: mol_type = other RNA
gggtgtggggcgagaggaag

SEQ ID NO: 2178 - RNA, 20 nt, synthetic construct
  source 1..20: mol_type = other RNA
ggggtgtggggcgagaggaa

SEQ ID NO: 2179 - RNA, 20 nt, synthetic construct
  source 1..20: mol_type = other RNA
tggggtgtggggcgagagga

SEQ ID NO: 2180 - RNA, 20 nt, synthetic construct
  source 1..20: mol_type = other RNA
atggggtgtggggcgagagg

SEQ ID NO: 2181 - RNA, 20 nt, synthetic construct
  source 1..20: mol_type = other RNA
aatggggtgtggggcgagag

SEQ ID NO: 2182 - RNA, 20 nt, synthetic construct
  source 1..20: mol_type = other RNA
aaatggggtgtggggcgaga

SEQ ID NO: 2183 - RNA, 20 nt, synthetic construct
  source 1..20: mol_type = other RNA
gaaatggggtgtggggcgag

SEQ ID NO: 2184 - RNA, 20 nt, synthetic construct
  source 1..20: mol_type = other RNA
agaaatggggtgtggggcga

SEQ ID NO: 2185 - RNA, 20 nt, synthetic construct
  source 1..20: mol_type = other RNA
tagaaatggggtgtggggcg

SEQ ID NO: 2186 - RNA, 20 nt, synthetic construct
  source 1..20: mol_type = other RNA
ctagaaatggggtgtggggc

SEQ ID NO: 2187 - RNA, 20 nt, synthetic construct
  source 1..20: mol_type = other RNA
cctagaaatggggtgtgggg

SEQ ID NO: 2188 - RNA, 20 nt, synthetic construct
  source 1..20: mol_type = other RNA
ccctagaaatggggtgtggg

SEQ ID NO: 2189 - RNA, 20 nt, synthetic construct
  source 1..20: mol_type = other RNA
tccctagaaatggggtgtgg

SEQ ID NO: 2190 - RNA, 20 nt, synthetic construct
  source 1..20: mol_type = other RNA
atccctagaaatggggtgtg

SEQ ID NO: 2191 - RNA, 20 nt, synthetic construct
  source 1..20: mol_type = other RNA
gatccctagaaatggggtgt

SEQ ID NO: 2192 - RNA, 20 nt, synthetic construct
  source 1..20: mol_type = other RNA
tgatccctagaaatggggtg

SEQ ID NO: 2193 - RNA, 20 nt, synthetic construct
  source 1..20: mol_type = other RNA
atgatccctagaaatggggt

SEQ ID NO: 2194 - RNA, 20 nt, synthetic construct
  source 1..20: mol_type = other RNA
catgatccctagaaatgggg

SEQ ID NO: 2195 - RNA, 20 nt, synthetic construct
  source 1..20: mol_type = other RNA
acatgatccctagaaatggg

SEQ ID NO: 2196 - RNA, 20 nt, synthetic construct
  source 1..20: mol_type = other RNA
cacatgatccctagaaatgg

SEQ ID NO: 2197 - RNA, 20 nt, synthetic construct
  source 1..20: mol_type = other RNA
tcacatgatccctagaaatg

SEQ ID NO: 2198 - RNA, 20 nt, synthetic construct
  source 1..20: mol_type = other RNA
atcacatgatccctagaaat

SEQ ID NO: 2199 - RNA, 20 nt, synthetic construct
  source 1..20: mol_type = other RNA
aatcacatgatccctagaaa

SEQ ID NO: 2200 - RNA, 20 nt, synthetic construct
  source 1..20: mol_type = other RNA
caatcacatgatccctagaa

SEQ ID NO: 2201 - RNA, 20 nt, synthetic construct
  source 1..20: mol_type = other RNA
ccaatcacatgatccctaga

SEQ ID NO: 2202 - RNA, 20 nt, synthetic construct
  source 1..20: mol_type = other RNA
tccaatcacatgatccctag

SEQ ID NO: 2203 - RNA, 20 nt, synthetic construct
  source 1..20: mol_type = other RNA
ctccaatcacatgatcccta

SEQ ID NO: 2204 - RNA, 20 nt, synthetic construct
  source 1..20: mol_type = other RNA
tctccaatcacatgatccct

SEQ ID NO: 2205 - RNA, 20 nt, synthetic construct
  source 1..20: mol_type = other RNA
ttctccaatcacatgatccc

SEQ ID NO: 2206 - RNA, 20 nt, synthetic construct
  source 1..20: mol_type = other RNA
attctccaatcacatgatcc

SEQ ID NO: 2207 - RNA, 20 nt, synthetic construct
  source 1..20: mol_type = other RNA
gattctccaatcacatgatc

SEQ ID NO: 2208 - RNA, 20 nt, synthetic construct
  source 1..20: mol_type = other RNA
tgattctccaatcacatgat

SEQ ID NO: 2209 - RNA, 20 nt, synthetic construct
  source 1..20: mol_type = other RNA
atgattctccaatcacatga

SEQ ID NO: 2210 - RNA, 20 nt, synthetic construct
  source 1..20: mol_type = other RNA
catgattctccaatcacatg

SEQ ID NO: 2211 - RNA, 20 nt, synthetic construct
  source 1..20: mol_type = other RNA
acatgattctccaatcacat

SEQ ID NO: 2212 - RNA, 20 nt, synthetic construct
  source 1..20: mol_type = other RNA
cacatgattctccaatcaca

SEQ ID NO: 2213 - RNA, 20 nt, synthetic construct
  source 1..20: mol_type = other RNA
tcacatgattctccaatcac

SEQ ID NO: 2214 - RNA, 20 nt, synthetic construct
  source 1..20: mol_type = other RNA
gtcacatgattctccaatca

SEQ ID NO: 2215 - RNA, 20 nt, synthetic construct
  source 1..20: mol_type = other RNA
cgtcacatgattctccaatc

SEQ ID NO: 2216 - RNA, 20 nt, synthetic construct
  source 1..20: mol_type = other RNA
acgtcacatgattctccaat

SEQ ID NO: 2217 - RNA, 20 nt, synthetic construct
  source 1..20: mol_type = other RNA
gacgtcacatgattctccaa

SEQ ID NO: 2218 - RNA, 20 nt, synthetic construct
  source 1..20: mol_type = other RNA
cgacgtcacatgattctcca

SEQ ID NO: 2219 - RNA, 20 nt, synthetic construct
  source 1..20: mol_type = other RNA
ccgacgtcacatgattctcc

SEQ ID NO: 2220 - RNA, 20 nt, synthetic construct
  source 1..20: mol_type = other RNA
cccgacgtcacatgattctc

SEQ ID NO: 2221 - RNA, 20 nt, synthetic construct
  source 1..20: mol_type = other RNA
tcccgacgtcacatgattct

SEQ ID NO: 2222 - RNA, 20 nt, synthetic construct
  source 1..20: mol_type = other RNA
gtcccgacgtcacatgattc

SEQ ID NO: 2223 - RNA, 20 nt, synthetic construct
  source 1..20: mol_type = other RNA
tgtcccgacgtcacatgatt

SEQ ID NO: 2224 - RNA, 20 nt, synthetic construct
  source 1..20: mol_type = other RNA
ctgtcccgacgtcacatgat

SEQ ID NO: 2225 - RNA, 20 nt, synthetic construct
  source 1..20: mol_type = other RNA
gctgtcccgacgtcacatga

SEQ ID NO: 2226 - RNA, 20 nt, synthetic construct
  source 1..20: mol_type = other RNA
ggctgtcccgacgtcacatg

SEQ ID NO: 2227 - RNA, 20 nt, synthetic construct
  source 1..20: mol_type = other RNA
aggctgtcccgacgtcacat

SEQ ID NO: 2228 - RNA, 20 nt, synthetic construct
  source 1..20: mol_type = other RNA
gaggctgtcccgacgtcaca

SEQ ID NO: 2229 - RNA, 20 nt, synthetic construct
  source 1..20: mol_type = other RNA
tgaggctgtcccgacgtcac

SEQ ID NO: 2230 - RNA, 20 nt, synthetic construct
  source 1..20: mol_type = other RNA
ctgaggctgtcccgacgtca

SEQ ID NO: 2231 - RNA, 20 nt, synthetic construct
  source 1..20: mol_type = other RNA
gctgaggctgtcccgacgtc

SEQ ID NO: 2232 - RNA, 20 nt, synthetic construct
  source 1..20: mol_type = other RNA
tgctgaggctgtcccgacgt

SEQ ID NO: 2233 - RNA, 20 nt, synthetic construct
  source 1..20: mol_type = other RNA
ctgctgaggctgtcccgacg

SEQ ID NO: 2234 - RNA, 20 nt, synthetic construct
  source 1..20: mol_type = other RNA
cctgctgaggctgtcccgac

SEQ ID NO: 2235 - RNA, 20 nt, synthetic construct
  source 1..20: mol_type = other RNA
ccctgctgaggctgtcccga

SEQ ID NO: 2236 - RNA, 20 nt, synthetic construct
  source 1..20: mol_type = other RNA
gccctgctgaggctgtcccg

SEQ ID NO: 2237 - RNA, 20 nt, synthetic construct
  source 1..20: mol_type = other RNA
tgccctgctgaggctgtccc

SEQ ID NO: 2238 - RNA, 20 nt, synthetic construct
  source 1..20: mol_type = other RNA
ctgccctgctgaggctgtcc

SEQ ID NO: 2239 - RNA, 20 nt, synthetic construct
  source 1..20: mol_type = other RNA
gctgccctgctgaggctgtc

SEQ ID NO: 2240 - RNA, 20 nt, synthetic construct
  source 1..20: mol_type = other RNA
agctgccctgctgaggctgt

SEQ ID NO: 2241 - RNA, 20 nt, synthetic construct
  source 1..20: mol_type = other RNA
cagctgccctgctgaggctg

SEQ ID NO: 2242 - RNA, 20 nt, synthetic construct
  source 1..20: mol_type = other RNA
ccagctgccctgctgaggct

SEQ ID NO: 2243 - RNA, 20 nt, synthetic construct
  source 1..20: mol_type = other RNA
accagctgccctgctgaggc

SEQ ID NO: 2244 - RNA, 20 nt, synthetic construct
  source 1..20: mol_type = other RNA
caccagctgccctgctgagg

SEQ ID NO: 2245 - RNA, 20 nt, synthetic construct
  source 1..20: mol_type = other RNA
gcaccagctgccctgctgag

SEQ ID NO: 2246 - RNA, 20 nt, synthetic construct
  source 1..20: mol_type = other RNA
agcaccagctgccctgctga

SEQ ID NO: 2247 - RNA, 20 nt, synthetic construct
  source 1..20: mol_type = other RNA
gagcaccagctgccctgctg

SEQ ID NO: 2248 - RNA, 20 nt, synthetic construct
  source 1..20: mol_type = other RNA
cgagcaccagctgccctgct

SEQ ID NO: 2249 - RNA, 20 nt, synthetic construct
  source 1..20: mol_type = other RNA
acgagcaccagctgccctgc

SEQ ID NO: 2250 - RNA, 20 nt, synthetic construct
  source 1..20: mol_type = other RNA
gacgagcaccagctgccctg

SEQ ID NO: 2251 - RNA, 20 nt, synthetic construct
  source 1..20: mol_type = other RNA
cgacgagcaccagctgccct

SEQ ID NO: 2252 - RNA, 20 nt, synthetic construct
  source 1..20: mol_type = other RNA
gcgacgagcaccagctgccc

SEQ ID NO: 2253 - RNA, 20 nt, synthetic construct
  source 1..20: mol_type = other RNA
ggcgacgagcaccagctgcc

SEQ ID NO: 2254 - RNA, 20 nt, synthetic construct
  source 1..20: mol_type = other RNA
aggcgacgagcaccagctgc

SEQ ID NO: 2255 - RNA, 20 nt, synthetic construct
  source 1..20: mol_type = other RNA
aaggcgacgagcaccagctg

SEQ ID NO: 2256 - RNA, 20 nt, synthetic construct
  source 1..20: mol_type = other RNA
gaaggcgacgagcaccagct

SEQ ID NO: 2257 - RNA, 20 nt, synthetic construct
  source 1..20: mol_type = other RNA
ggaaggcgacgagcaccagc

SEQ ID NO: 2258 - RNA, 20 nt, synthetic construct
  source 1..20: mol_type = other RNA
aggaaggcgacgagcaccag

SEQ ID NO: 2259 - RNA, 20 nt, synthetic construct
  source 1..20: mol_type = other RNA
aaggaaggcgacgagcacca

SEQ ID NO: 2260 - RNA, 20 nt, synthetic construct
  source 1..20: mol_type = other RNA
taaggaaggcgacgagcacc

SEQ ID NO: 2261 - RNA, 20 nt, synthetic construct
  source 1..20: mol_type = other RNA
ttaaggaaggcgacgagcac

SEQ ID NO: 2262 - RNA, 20 nt, synthetic construct
  source 1..20: mol_type = other RNA
gttaaggaaggcgacgagca

SEQ ID NO: 2263 - RNA, 20 nt, synthetic construct
  source 1..20: mol_type = other RNA
ggttaaggaaggcgacgagc

SEQ ID NO: 2264 - RNA, 20 nt, synthetic construct
  source 1..20: mol_type = other RNA
gggttaaggaaggcgacgag

SEQ ID NO: 2265 - RNA, 20 nt, synthetic construct
  source 1..20: mol_type = other RNA
tgggttaaggaaggcgacga

SEQ ID NO: 2266 - RNA, 20 nt, synthetic construct
  source 1..20: mol_type = other RNA
atgggttaaggaaggcgacg

SEQ ID NO: 2267 - RNA, 20 nt, synthetic construct
  source 1..20: mol_type = other RNA
gatgggttaaggaaggcgac

SEQ ID NO: 2268 - RNA, 20 nt, synthetic construct
  source 1..20: mol_type = other RNA
ggatgggttaaggaaggcga

SEQ ID NO: 2269 - RNA, 20 nt, synthetic construct
  source 1..20: mol_type = other RNA
aggatgggttaaggaaggcg

SEQ ID NO: 2270 - RNA, 20 nt, synthetic construct
  source 1..20: mol_type = other RNA
caggatgggttaaggaaggc

SEQ ID NO: 2271 - RNA, 20 nt, synthetic construct
  source 1..20: mol_type = other RNA
gcaggatgggttaaggaagg

SEQ ID NO: 2272 - RNA, 20 nt, synthetic construct
  source 1..20: mol_type = other RNA
tgcaggatgggttaaggaag

SEQ ID NO: 2273 - RNA, 20 nt, synthetic construct
  source 1..20: mol_type = other RNA
ctgcaggatgggttaaggaa

SEQ ID NO: 2274 - RNA, 20 nt, synthetic construct
  source 1..20: mol_type = other RNA
cctgcaggatgggttaagga

SEQ ID NO: 2275 - RNA, 20 nt, synthetic construct
  source 1..20: mol_type = other RNA
gcctgcaggatgggttaagg

SEQ ID NO: 2276 - RNA, 20 nt, synthetic construct
  source 1..20: mol_type = other RNA
cgcctgcaggatgggttaag

SEQ ID NO: 2277 - RNA, 20 nt, synthetic construct
  source 1..20: mol_type = other RNA
gcgcctgcaggatgggttaa

SEQ ID NO: 2278 - RNA, 20 nt, synthetic construct
  source 1..20: mol_type = other RNA
ggcgcctgcaggatgggtta

SEQ ID NO: 2279 - RNA, 20 nt, synthetic construct
  source 1..20: mol_type = other RNA
aggcgcctgcaggatgggtt

SEQ ID NO: 2280 - RNA, 20 nt, synthetic construct
  source 1..20: mol_type = other RNA
caggcgcctgcaggatgggt

SEQ ID NO: 2281 - RNA, 20 nt, synthetic construct
  source 1..20: mol_type = other RNA
ccaggcgcctgcaggatggg

SEQ ID NO: 2282 - RNA, 20 nt, synthetic construct
  source 1..20: mol_type = other RNA
cccaggcgcctgcaggatgg

SEQ ID NO: 2283 - RNA, 20 nt, synthetic construct
  source 1..20: mol_type = other RNA
ccccaggcgcctgcaggatg

SEQ ID NO: 2284 - RNA, 20 nt, synthetic construct
  source 1..20: mol_type = other RNA
cccccaggcgcctgcaggat

SEQ ID NO: 2285 - RNA, 20 nt, synthetic construct
  source 1..20: mol_type = other RNA
tcccccaggcgcctgcagga

SEQ ID NO: 2286 - RNA, 20 nt, synthetic construct
  source 1..20: mol_type = other RNA
ctcccccaggcgcctgcagg

SEQ ID NO: 2287 - RNA, 20 nt, synthetic construct
  source 1..20: mol_type = other RNA
actcccccaggcgcctgcag

SEQ ID NO: 2288 - RNA, 20 nt, synthetic construct
  source 1..20: mol_type = other RNA
aactcccccaggcgcctgca

SEQ ID NO: 2289 - RNA, 20 nt, synthetic construct
  source 1..20: mol_type = other RNA
aaactcccccaggcgcctgc

SEQ ID NO: 2290 - RNA, 20 nt, synthetic construct
  source 1..20: mol_type = other RNA
caaactcccccaggcgcctg

SEQ ID NO: 2291 - RNA, 20 nt, synthetic construct
  source 1..20: mol_type = other RNA
gcaaactcccccaggcgcct

SEQ ID NO: 2292 - RNA, 20 nt, synthetic construct
  source 1..20: mol_type = other RNA
agcaaactcccccaggcgcc

SEQ ID NO: 2293 - RNA, 20 nt, synthetic construct
  source 1..20: mol_type = other RNA
tagcaaactcccccaggcgc

SEQ ID NO: 2294 - RNA, 20 nt, synthetic construct
  source 1..20: mol_type = other RNA
ctagcaaactcccccaggcg

SEQ ID NO: 2295 - RNA, 20 nt, synthetic construct
  source 1..20: mol_type = other RNA
tctagcaaactcccccaggc

SEQ ID NO: 2296 - RNA, 20 nt, synthetic construct
  source 1..20: mol_type = other RNA
ctctagcaaactcccccagg

SEQ ID NO: 2297 - RNA, 20 nt, synthetic construct
  source 1..20: mol_type = other RNA
tctctagcaaactcccccag

SEQ ID NO: 2298 - RNA, 20 nt, synthetic construct
  source 1..20: mol_type = other RNA
atctctagcaaactccccca

SEQ ID NO: 2299 - RNA, 20 nt, synthetic construct
  source 1..20: mol_type = other RNA
catctctagcaaactccccc

SEQ ID NO: 2300 - RNA, 20 nt, synthetic construct
  source 1..20: mol_type = other RNA
tcatctctagcaaactcccc

SEQ ID NO: 2301 - RNA, 20 nt, synthetic construct
  source 1..20: mol_type = other RNA
atcatctctagcaaactccc

SEQ ID NO: 2302 - RNA, 20 nt, synthetic construct
  source 1..20: mol_type = other RNA
tatcatctctagcaaactcc

SEQ ID NO: 2303 - RNA, 20 nt, synthetic construct
  source 1..20: mol_type = other RNA
ctatcatctctagcaaactc

SEQ ID NO: 2304 - RNA, 20 nt, synthetic construct
  source 1..20: mol_type = other RNA
gctatcatctctagcaaact

SEQ ID NO: 2305 - RNA, 20 nt, synthetic construct
  source 1..20: mol_type = other RNA
cgctatcatctctagcaaac

SEQ ID NO: 2306 - RNA, 20 nt, synthetic construct
  source 1..20: mol_type = other RNA
gcgctatcatctctagcaaa

SEQ ID NO: 2307 - RNA, 20 nt, synthetic construct
  source 1..20: mol_type = other RNA
cgcgctatcatctctagcaa

SEQ ID NO: 2308 - RNA, 20 nt, synthetic construct
  source 1..20: mol_type = other RNA
acgcgctatcatctctagca

SEQ ID NO: 2309 - RNA, 20 nt, synthetic construct
  source 1..20: mol_type = other RNA
cacgcgctatcatctctagc

SEQ ID NO: 2310 - RNA, 20 nt, synthetic construct
  source 1..20: mol_type = other RNA
acacgcgctatcatctctag

SEQ ID NO: 2311 - RNA, 20 nt, synthetic construct
  source 1..20: mol_type = other RNA
gacacgcgctatcatctcta

SEQ ID NO: 2312 - RNA, 20 nt, synthetic construct
  source 1..20: mol_type = other RNA
agacacgcgctatcatctct

SEQ ID NO: 2313 - RNA, 20 nt, synthetic construct
  source 1..20: mol_type = other RNA
cagacacgcgctatcatctc

SEQ ID NO: 2314 - RNA, 20 nt, synthetic construct
  source 1..20: mol_type = other RNA
ccagacacgcgctatcatct

SEQ ID NO: 2315 - RNA, 20 nt, synthetic construct
  source 1..20: mol_type = other RNA
cccagacacgcgctatcatc

SEQ ID NO: 2316 - RNA, 20 nt, synthetic construct
  source 1..20: mol_type = other RNA
ccccagacacgcgctatcat

SEQ ID NO: 2317 - RNA, 20 nt, synthetic construct
  source 1..20: mol_type = other RNA
gccccagacacgcgctatca

SEQ ID NO: 2318 - RNA, 20 nt, synthetic construct
  source 1..20: mol_type = other RNA
tgccccagacacgcgctatc

SEQ ID NO: 2319 - RNA, 20 nt, synthetic construct
  source 1..20: mol_type = other RNA
atgccccagacacgcgctat

SEQ ID NO: 2320 - RNA, 20 nt, synthetic construct
  source 1..20: mol_type = other RNA
aatgccccagacacgcgcta

SEQ ID NO: 2321 - RNA, 20 nt, synthetic construct
  source 1..20: mol_type = other RNA
caatgccccagacacgcgct

SEQ ID NO: 2322 - RNA, 20 nt, synthetic construct
  source 1..20: mol_type = other RNA
tcaatgccccagacacgcgc

SEQ ID NO: 2323 - RNA, 20 nt, synthetic construct
  source 1..20: mol_type = other RNA
gtcaatgccccagacacgcg

SEQ ID NO: 2324 - RNA, 20 nt, synthetic construct
  source 1..20: mol_type = other RNA
tgtcaatgccccagacacgc

SEQ ID NO: 2325 - RNA, 20 nt, synthetic construct
  source 1..20: mol_type = other RNA
ctgtcaatgccccagacacg

SEQ ID NO: 2326 - RNA, 20 nt, synthetic construct
  source 1..20: mol_type = other RNA
actgtcaatgccccagacac

SEQ ID NO: 2327 - RNA, 20 nt, synthetic construct
  source 1..20: mol_type = other RNA
cactgtcaatgccccagaca

SEQ ID NO: 2328 - RNA, 20 nt, synthetic construct
  source 1..20: mol_type = other RNA
gcactgtcaatgccccagac

SEQ ID NO: 2329 - RNA, 20 nt, synthetic construct
  source 1..20: mol_type = other RNA
cgcactgtcaatgccccaga

SEQ ID NO: 2330 - RNA, 20 nt, synthetic construct
  source 1..20: mol_type = other RNA
tcgcactgtcaatgccccag

SEQ ID NO: 2331 - RNA, 20 nt, synthetic construct
  source 1..20: mol_type = other RNA
ctcgcactgtcaatgcccca

SEQ ID NO: 2332 - RNA, 20 nt, synthetic construct
  source 1..20: mol_type = other RNA
cctcgcactgtcaatgcccc

SEQ ID NO: 2333 - RNA, 20 nt, synthetic construct
  source 1..20: mol_type = other RNA
ccctcgcactgtcaatgccc

SEQ ID NO: 2334 - RNA, 20 nt, synthetic construct
  source 1..20: mol_type = other RNA
tccctcgcactgtcaatgcc

SEQ ID NO: 2335 - RNA, 20 nt, synthetic construct
  source 1..20: mol_type = other RNA
ctccctcgcactgtcaatgc

SEQ ID NO: 2336 - RNA, 20 nt, synthetic construct
  source 1..20: mol_type = other RNA
actccctcgcactgtcaatg

SEQ ID NO: 2337 - RNA, 20 nt, synthetic construct
  source 1..20: mol_type = other RNA
cactccctcgcactgtcaat

SEQ ID NO: 2338 - RNA, 20 nt, synthetic construct
  source 1..20: mol_type = other RNA
acactccctcgcactgtcaa

SEQ ID NO: 2339 - RNA, 20 nt, synthetic construct
  source 1..20: mol_type = other RNA
aacactccctcgcactgtca

SEQ ID NO: 2340 - RNA, 20 nt, synthetic construct
  source 1..20: mol_type = other RNA
taacactccctcgcactgtc

SEQ ID NO: 2341 - RNA, 20 nt, synthetic construct
  source 1..20: mol_type = other RNA
ataacactccctcgcactgt

SEQ ID NO: 2342 - RNA, 20 nt, synthetic construct
  source 1..20: mol_type = other RNA
cataacactccctcgcactg

SEQ ID NO: 2343 - RNA, 20 nt, synthetic construct
  source 1..20: mol_type = other RNA
tcataacactccctcgcact

SEQ ID NO: 2344 - RNA, 20 nt, synthetic construct
  source 1..20: mol_type = other RNA
ttcataacactccctcgcac

SEQ ID NO: 2345 - RNA, 20 nt, synthetic construct
  source 1..20: mol_type = other RNA
attcataacactccctcgca

SEQ ID NO: 2346 - RNA, 20 nt, synthetic construct
  source 1..20: mol_type = other RNA
aattcataacactccctcgc

SEQ ID NO: 2347 - RNA, 20 nt, synthetic construct
  source 1..20: mol_type = other RNA
caattcataacactccctcg

SEQ ID NO: 2348 - RNA, 20 nt, synthetic construct
  source 1..20: mol_type = other RNA
ccaattcataacactccctc

SEQ ID NO: 2349 - RNA, 20 nt, synthetic construct
  source 1..20: mol_type = other RNA
cccaattcataacactccct

SEQ ID NO: 2350 - RNA, 20 nt, synthetic construct
  source 1..20: mol_type = other RNA
tcccaattcataacactccc

SEQ ID NO: 2351 - RNA, 20 nt, synthetic construct
  source 1..20: mol_type = other RNA
ttcccaattcataacactcc

SEQ ID NO: 2352 - RNA, 20 nt, synthetic construct
  source 1..20: mol_type = other RNA
attcccaattcataacactc

SEQ ID NO: 2353 - RNA, 20 nt, synthetic construct
  source 1..20: mol_type = other RNA
tattcccaattcataacact

SEQ ID NO: 2354 - RNA, 20 nt, synthetic construct
  source 1..20: mol_type = other RNA
atattcccaattcataacac

SEQ ID NO: 2355 - RNA, 20 nt, synthetic construct
  source 1..20: mol_type = other RNA
aatattcccaattcataaca

SEQ ID NO: 2356 - RNA, 20 nt, synthetic construct
  source 1..20: mol_type = other RNA
aaatattcccaattcataac

SEQ ID NO: 2357 - RNA, 20 nt, synthetic construct
  source 1..20: mol_type = other RNA
caaatattcccaattcataa

SEQ ID NO: 2358 - RNA, 20 nt, synthetic construct
  source 1..20: mol_type = other RNA
acaaatattcccaattcata

SEQ ID NO: 2359 - RNA, 20 nt, synthetic construct
  source 1..20: mol_type = other RNA
cacaaatattcccaattcat

SEQ ID NO: 2360 - RNA, 20 nt, synthetic construct
  source 1..20: mol_type = other RNA
gcacaaatattcccaattca

SEQ ID NO: 2361 - RNA, 20 nt, synthetic construct
  source 1..20: mol_type = other RNA
agcacaaatattcccaattc

SEQ ID NO: 2362 - RNA, 20 nt, synthetic construct
  source 1..20: mol_type = other RNA
gagcacaaatattcccaatt

SEQ ID NO: 2363 - RNA, 20 nt, synthetic construct
  source 1..20: mol_type = other RNA
cgagcacaaatattcccaat

SEQ ID NO: 2364 - RNA, 20 nt, synthetic construct
  source 1..20: mol_type = other RNA
gcgagcacaaatattcccaa

SEQ ID NO: 2365 - RNA, 20 nt, synthetic construct
  source 1..20: mol_type = other RNA
ggcgagcacaaatattccca

SEQ ID NO: 2366 - RNA, 20 nt, synthetic construct
  source 1..20: mol_type = other RNA
aggcgagcacaaatattccc

SEQ ID NO: 2367 - RNA, 20 nt, synthetic construct
  source 1..20: mol_type = other RNA
aaggcgagcacaaatattcc

SEQ ID NO: 2368 - RNA, 20 nt, synthetic construct
  source 1..20: mol_type = other RNA
aaaggcgagcacaaatattc

SEQ ID NO: 2369 - RNA, 20 nt, synthetic construct
  source 1..20: mol_type = other RNA
gaaaggcgagcacaaatatt

SEQ ID NO: 2370 - RNA, 20 nt, synthetic construct
  source 1..20: mol_type = other RNA
agaaaggcgagcacaaatat

SEQ ID NO: 2371 - RNA, 20 nt, synthetic construct
  source 1..20: mol_type = other RNA
tagaaaggcgagcacaaata

SEQ ID NO: 2372 - RNA, 20 nt, synthetic construct
  source 1..20: mol_type = other RNA
atagaaaggcgagcacaaat

SEQ ID NO: 2373 - RNA, 20 nt, synthetic construct
  source 1..20: mol_type = other RNA
gatagaaaggcgagcacaaa

SEQ ID NO: 2374 - RNA, 20 nt, synthetic construct
  source 1..20: mol_type = other RNA
ggatagaaaggcgagcacaa

SEQ ID NO: 2375 - RNA, 20 nt, synthetic construct
  source 1..20: mol_type = other RNA
aggatagaaaggcgagcaca

SEQ ID NO: 2376 - RNA, 20 nt, synthetic construct
  source 1..20: mol_type = other RNA
aaggatagaaaggcgagcac

SEQ ID NO: 2377 - RNA, 20 nt, synthetic construct
  source 1..20: mol_type = other RNA
aaaggatagaaaggcgagca

SEQ ID NO: 2378 - RNA, 20 nt, synthetic construct
  source 1..20: mol_type = other RNA
aaaaggatagaaaggcgagc

SEQ ID NO: 2379 - RNA, 20 nt, synthetic construct
  source 1..20: mol_type = other RNA
caaaaggatagaaaggcgag

SEQ ID NO: 2380 - RNA, 20 nt, synthetic construct
  source 1..20: mol_type = other RNA
acaaaaggatagaaaggcga

SEQ ID NO: 2381 - RNA, 20 nt, synthetic construct
  source 1..20: mol_type = other RNA
aacaaaaggatagaaaggcg

SEQ ID NO: 2382 - RNA, 20 nt, synthetic construct
  source 1..20: mol_type = other RNA
aaacaaaaggatagaaaggc

SEQ ID NO: 2383 - RNA, 20 nt, synthetic construct
  source 1..20: mol_type = other RNA
caaacaaaaggatagaaagg

SEQ ID NO: 2384 - RNA, 20 nt, synthetic construct
  source 1..20: mol_type = other RNA
acaaacaaaaggatagaaag

SEQ ID NO: 2385 - RNA, 20 nt, synthetic construct
  source 1..20: mol_type = other RNA
aacaaacaaaaggatagaaa

SEQ ID NO: 2386 - RNA, 20 nt, synthetic construct
  source 1..20: mol_type = other RNA
aaacaaacaaaaggatagaa

SEQ ID NO: 2387 - RNA, 20 nt, synthetic construct
  source 1..20: mol_type = other RNA
caaacaaacaaaaggataga

SEQ ID NO: 2388 - RNA, 20 nt, synthetic construct
  source 1..20: mol_type = other RNA
acaaacaaacaaaaggatag

SEQ ID NO: 2389 - RNA, 20 nt, synthetic construct
  source 1..20: mol_type = other RNA
aacaaacaaacaaaaggata

SEQ ID NO: 2390 - RNA, 20 nt, synthetic construct
  source 1..20: mol_type = other RNA
gaacaaacaaacaaaaggat

SEQ ID NO: 2391 - RNA, 20 nt, synthetic construct
  source 1..20: mol_type = other RNA
agaacaaacaaacaaaagga

SEQ ID NO: 2392 - RNA, 20 nt, synthetic construct
  source 1..20: mol_type = other RNA
cagaacaaacaaacaaaagg

SEQ ID NO: 2393 - RNA, 20 nt, synthetic construct
  source 1..20: mol_type = other RNA
tcagaacaaacaaacaaaag

SEQ ID NO: 2394 - RNA, 20 nt, synthetic construct
  source 1..20: mol_type = other RNA
ctcagaacaaacaaacaaaa

SEQ ID NO: 2395 - RNA, 20 nt, synthetic construct
  source 1..20: mol_type = other RNA
tctcagaacaaacaaacaaa

SEQ ID NO: 2396 - RNA, 20 nt, synthetic construct
  source 1..20: mol_type = other RNA
gtctcagaacaaacaaacaa

SEQ ID NO: 2397 - RNA, 20 nt, synthetic construct
  source 1..20: mol_type = other RNA
cgtctcagaacaaacaaaca

SEQ ID NO: 2398 - RNA, 20 nt, synthetic construct
  source 1..20: mol_type = other RNA
ccgtctcagaacaaacaaac

SEQ ID NO: 2399 - RNA, 20 nt, synthetic construct
  source 1..20: mol_type = other RNA
tccgtctcagaacaaacaaa

SEQ ID NO: 2400 - RNA, 20 nt, synthetic construct
  source 1..20: mol_type = other RNA
ctccgtctcagaacaaacaa

SEQ ID NO: 2401 - RNA, 20 nt, synthetic construct
  source 1..20: mol_type = other RNA
actccgtctcagaacaaaca

SEQ ID NO: 2402 - RNA, 20 nt, synthetic construct
  source 1..20: mol_type = other RNA
gactccgtctcagaacaaac

SEQ ID NO: 2403 - RNA, 20 nt, synthetic construct
  source 1..20: mol_type = other RNA
agactccgtctcagaacaaa

SEQ ID NO: 2404 - RNA, 20 nt, synthetic construct
  source 1..20: mol_type = other RNA
gagactccgtctcagaacaa

SEQ ID NO: 2405 - RNA, 20 nt, synthetic construct
  source 1..20: mol_type = other RNA
tgagactccgtctcagaaca

SEQ ID NO: 2406 - RNA, 20 nt, synthetic construct
  source 1..20: mol_type = other RNA
gtgagactccgtctcagaac

SEQ ID NO: 2407 - RNA, 20 nt, synthetic construct
  source 1..20: mol_type = other RNA
agtgagactccgtctcagaa

SEQ ID NO: 2408 - RNA, 20 nt, synthetic construct
  source 1..20: mol_type = other RNA
gagtgagactccgtctcaga

SEQ ID NO: 2409 - RNA, 20 nt, synthetic construct
  source 1..20: mol_type = other RNA
agagtgagactccgtctcag

SEQ ID NO: 2410 - RNA, 20 nt, synthetic construct
  source 1..20: mol_type = other RNA
cagagtgagactccgtctca

SEQ ID NO: 2411 - RNA, 20 nt, synthetic construct
  source 1..20: mol_type = other RNA
acagagtgagactccgtctc

SEQ ID NO: 2412 - RNA, 20 nt, synthetic construct
  source 1..20: mol_type = other RNA
gacagagtgagactccgtct

SEQ ID NO: 2413 - RNA, 20 nt, synthetic construct
  source 1..20: mol_type = other RNA
cgacagagtgagactccgtc

SEQ ID NO: 2414 - RNA, 20 nt, synthetic construct
  source 1..20: mol_type = other RNA
gcgacagagtgagactccgt

SEQ ID NO: 2415 - RNA, 20 nt, synthetic construct
  source 1..20: mol_type = other RNA
ggcgacagagtgagactccg

SEQ ID NO: 2416 - RNA, 20 nt, synthetic construct
  source 1..20: mol_type = other RNA
tggcgacagagtgagactcc

SEQ ID NO: 2417 - RNA, 20 nt, synthetic construct
  source 1..20: mol_type = other RNA
ctggcgacagagtgagactc

SEQ ID NO: 2418 - RNA, 20 nt, synthetic construct
  source 1..20: mol_type = other RNA
cctggcgacagagtgagact

SEQ ID NO: 2419 - RNA, 20 nt, synthetic construct
  source 1..20: mol_type = other RNA
gcctggcgacagagtgagac

SEQ ID NO: 2420 - RNA, 20 nt, synthetic construct
  source 1..20: mol_type = other RNA
agcctggcgacagagtgaga

SEQ ID NO: 2421 - RNA, 20 nt, synthetic construct
  source 1..20: mol_type = other RNA
cagcctggcgacagagtgag

SEQ ID NO: 2422 - RNA, 20 nt, synthetic construct
  source 1..20: mol_type = other RNA
ccagcctggcgacagagtga

SEQ ID NO: 2423 - RNA, 20 nt, synthetic construct
  source 1..20: mol_type = other RNA
tccagcctggcgacagagtg

SEQ ID NO: 2424 - RNA, 20 nt, synthetic construct
  source 1..20: mol_type = other RNA
ctccagcctggcgacagagt

SEQ ID NO: 2425 - RNA, 20 nt, synthetic construct
  source 1..20: mol_type = other RNA
actccagcctggcgacagag

SEQ ID NO: 2426 - RNA, 20 nt, synthetic construct
  source 1..20: mol_type = other RNA
cactccagcctggcgacaga

SEQ ID NO: 2427 - RNA, 20 nt, synthetic construct
  source 1..20: mol_type = other RNA
gcactccagcctggcgacag

SEQ ID NO: 2428 - RNA, 20 nt, synthetic construct
  source 1..20: mol_type = other RNA
tgcactccagcctggcgaca

SEQ ID NO: 2429 - RNA, 20 nt, synthetic construct
  source 1..20: mol_type = other RNA
ctgcactccagcctggcgac

SEQ ID NO: 2430 - RNA, 20 nt, synthetic construct
  source 1..20: mol_type = other RNA
actgcactccagcctggcga

SEQ ID NO: 2431 - RNA, 20 nt, synthetic construct
  source 1..20: mol_type = other RNA
cactgcactccagcctggcg

SEQ ID NO: 2432 - RNA, 20 nt, synthetic construct
  source 1..20: mol_type = other RNA
ccactgcactccagcctggc

SEQ ID NO: 2433 - RNA, 20 nt, synthetic construct
  source 1..20: mol_type = other RNA
gccactgcactccagcctgg

SEQ ID NO: 2434 - RNA, 20 nt, synthetic construct
  source 1..20: mol_type = other RNA
tgccactgcactccagcctg

SEQ ID NO: 2435 - RNA, 20 nt, synthetic construct
  source 1..20: mol_type = other RNA
gtgccactgcactccagcct

SEQ ID NO: 2436 - RNA, 20 nt, synthetic construct
  source 1..20: mol_type = other RNA
cgtgccactgcactccagcc

SEQ ID NO: 2437 - RNA, 20 nt, synthetic construct
  source 1..20: mol_type = other RNA
tcgtgccactgcactccagc

SEQ ID NO: 2438 - RNA, 20 nt, synthetic construct
  source 1..20: mol_type = other RNA
atcgtgccactgcactccag

SEQ ID NO: 2439 - RNA, 20 nt, synthetic construct
  source 1..20: mol_type = other RNA
gatcgtgccactgcactcca

SEQ ID NO: 2440 - RNA, 20 nt, synthetic construct
  source 1..20: mol_type = other RNA
agatcgtgccactgcactcc

SEQ ID NO: 2441 - RNA, 20 nt, synthetic construct
  source 1..20: mol_type = other RNA
gagatcgtgccactgcactc

SEQ ID NO: 2442 - RNA, 20 nt, synthetic construct
  source 1..20: mol_type = other RNA
cgagatcgtgccactgcact

SEQ ID NO: 2443 - RNA, 20 nt, synthetic construct
  source 1..20: mol_type = other RNA
ccgagatcgtgccactgcac

SEQ ID NO: 2444 - RNA, 20 nt, synthetic construct
  source 1..20: mol_type = other RNA
gccgagatcgtgccactgca

SEQ ID NO: 2445 - RNA, 20 nt, synthetic construct
  source 1..20: mol_type = other RNA
agccgagatcgtgccactgc

SEQ ID NO: 2446 - RNA, 20 nt, synthetic construct
  source 1..20: mol_type = other RNA
gagccgagatcgtgccactg

SEQ ID NO: 2447 - RNA, 20 nt, synthetic construct
  source 1..20: mol_type = other RNA
tgagccgagatcgtgccact

SEQ ID NO: 2448 - RNA, 20 nt, synthetic construct
  source 1..20: mol_type = other RNA
gtgagccgagatcgtgccac

SEQ ID NO: 2449 - RNA, 20 nt, synthetic construct
  source 1..20: mol_type = other RNA
agtgagccgagatcgtgcca

SEQ ID NO: 2450 - RNA, 20 nt, synthetic construct
  source 1..20: mol_type = other RNA
cagtgagccgagatcgtgcc

SEQ ID NO: 2451 - RNA, 20 nt, synthetic construct
  source 1..20: mol_type = other RNA
gcagtgagccgagatcgtgc

SEQ ID NO: 2452 - RNA, 20 nt, synthetic construct
  source 1..20: mol_type = other RNA
tgcagtgagccgagatcgtg

SEQ ID NO: 2453 - RNA, 20 nt, synthetic construct
  source 1..20: mol_type = other RNA
ttgcagtgagccgagatcgt

SEQ ID NO: 2454 - RNA, 20 nt, synthetic construct
  source 1..20: mol_type = other RNA
gttgcagtgagccgagatcg

SEQ ID NO: 2455 - RNA, 20 nt, synthetic construct
  source 1..20: mol_type = other RNA
ggttgcagtgagccgagatc

SEQ ID NO: 2456 - RNA, 20 nt, synthetic construct
  source 1..20: mol_type = other RNA
aggttgcagtgagccgagat

SEQ ID NO: 2457 - RNA, 20 nt, synthetic construct
  source 1..20: mol_type = other RNA
gaggttgcagtgagccgaga

SEQ ID NO: 2458 - RNA, 20 nt, synthetic construct
  source 1..20: mol_type = other RNA
agaggttgcagtgagccgag

SEQ ID NO: 2459 - RNA, 20 nt, synthetic construct
  source 1..20: mol_type = other RNA
cagaggttgcagtgagccga

SEQ ID NO: 2460 - RNA, 20 nt, synthetic construct
  source 1..20: mol_type = other RNA
gcagaggttgcagtgagccg

SEQ ID NO: 2461 - RNA, 20 nt, synthetic construct
  source 1..20: mol_type = other RNA
ggcagaggttgcagtgagcc

SEQ ID NO: 2462 - RNA, 20 nt, synthetic construct
  source 1..20: mol_type = other RNA
aggcagaggttgcagtgagc

SEQ ID NO: 2463 - RNA, 20 nt, synthetic construct
  source 1..20: mol_type = other RNA
gaggcagaggttgcagtgag

SEQ ID NO: 2464 - RNA, 20 nt, synthetic construct
  source 1..20: mol_type = other RNA
ggaggcagaggttgcagtga

SEQ ID NO: 2465 - RNA, 20 nt, synthetic construct
  source 1..20: mol_type = other RNA
gggaggcagaggttgcagtg

SEQ ID NO: 2466 - RNA, 20 nt, synthetic construct
  source 1..20: mol_type = other RNA
cgggaggcagaggttgcagt

SEQ ID NO: 2467 - RNA, 20 nt, synthetic construct
  source 1..20: mol_type = other RNA
ccgggaggcagaggttgcag

SEQ ID NO: 2468 - RNA, 20 nt, synthetic construct
  source 1..20: mol_type = other RNA
cccgggaggcagaggttgca

SEQ ID NO: 2469 - RNA, 20 nt, synthetic construct
  source 1..20: mol_type = other RNA
acccgggaggcagaggttgc

SEQ ID NO: 2470 - RNA, 20 nt, synthetic construct
  source 1..20: mol_type = other RNA
aacccgggaggcagaggttg

SEQ ID NO: 2471 - RNA, 20 nt, synthetic construct
  source 1..20: mol_type = other RNA
gaacccgggaggcagaggtt

SEQ ID NO: 2472 - RNA, 20 nt, synthetic construct
  source 1..20: mol_type = other RNA
tgaacccgggaggcagaggt

SEQ ID NO: 2473 - RNA, 20 nt, synthetic construct
  source 1..20: mol_type = other RNA
ttgaacccgggaggcagagg

SEQ ID NO: 2474 - RNA, 20 nt, synthetic construct
  source 1..20: mol_type = other RNA
cttgaacccgggaggcagag

SEQ ID NO: 2475 - RNA, 20 nt, synthetic construct
  source 1..20: mol_type = other RNA
gcttgaacccgggaggcaga

SEQ ID NO: 2476 - RNA, 20 nt, synthetic construct
  source 1..20: mol_type = other RNA
cgcttgaacccgggaggcag

SEQ ID NO: 2477 - RNA, 20 nt, synthetic construct
  source 1..20: mol_type = other RNA
tcgcttgaacccgggaggca

SEQ ID NO: 2478 - RNA, 20 nt, synthetic construct
  source 1..20: mol_type = other RNA
atcgcttgaacccgggaggc

SEQ ID NO: 2479 - RNA, 20 nt, synthetic construct
  source 1..20: mol_type = other RNA
aatcgcttgaacccgggagg

SEQ ID NO: 2480 - RNA, 20 nt, synthetic construct
  source 1..20: mol_type = other RNA
gaatcgcttgaacccgggag

SEQ ID NO: 2481 - RNA, 20 nt, synthetic construct
  source 1..20: mol_type = other RNA
agaatcgcttgaacccggga

SEQ ID NO: 2482 - RNA, 20 nt, synthetic construct
  source 1..20: mol_type = other RNA
gagaatcgcttgaacccggg

SEQ ID NO: 2483 - RNA, 20 nt, synthetic construct
  source 1..20: mol_type = other RNA
ggagaatcgcttgaacccgg

SEQ ID NO: 2484 - RNA, 20 nt, synthetic construct
  source 1..20: mol_type = other RNA
aggagaatcgcttgaacccg

SEQ ID NO: 2485 - RNA, 20 nt, synthetic construct
  source 1..20: mol_type = other RNA
caggagaatcgcttgaaccc

SEQ ID NO: 2486 - RNA, 20 nt, synthetic construct
  source 1..20: mol_type = other RNA
gcaggagaatcgcttgaacc

SEQ ID NO: 2487 - RNA, 20 nt, synthetic construct
  source 1..20: mol_type = other RNA
ggcaggagaatcgcttgaac

SEQ ID NO: 2488 - RNA, 20 nt, synthetic construct
  source 1..20: mol_type = other RNA
aggcaggagaatcgcttgaa

SEQ ID NO: 2489 - RNA, 20 nt, synthetic construct
  source 1..20: mol_type = other RNA
gaggcaggagaatcgcttga

SEQ ID NO: 2490 - RNA, 20 nt, synthetic construct
  source 1..20: mol_type = other RNA
tgaggcaggagaatcgcttg

SEQ ID NO: 2491 - RNA, 20 nt, synthetic construct
  source 1..20: mol_type = other RNA
ctgaggcaggagaatcgctt

SEQ ID NO: 2492 - RNA, 20 nt, synthetic construct
  source 1..20: mol_type = other RNA
gctgaggcaggagaatcgct

SEQ ID NO: 2493 - RNA, 20 nt, synthetic construct
  source 1..20: mol_type = other RNA
ggctgaggcaggagaatcgc

SEQ ID NO: 2494 - RNA, 20 nt, synthetic construct
  source 1..20: mol_type = other RNA
aggctgaggcaggagaatcg

SEQ ID NO: 2495 - RNA, 20 nt, synthetic construct
  source 1..20: mol_type = other RNA
gaggctgaggcaggagaatc

SEQ ID NO: 2496 - RNA, 20 nt, synthetic construct
  source 1..20: mol_type = other RNA
ggaggctgaggcaggagaat

SEQ ID NO: 2497 - RNA, 20 nt, synthetic construct
  source 1..20: mol_type = other RNA
gggaggctgaggcaggagaa

SEQ ID NO: 2498 - RNA, 20 nt, synthetic construct
  source 1..20: mol_type = other RNA
cgggaggctgaggcaggaga

SEQ ID NO: 2499 - RNA, 20 nt, synthetic construct
  source 1..20: mol_type = other RNA
tcgggaggctgaggcaggag

SEQ ID NO: 2500 - RNA, 20 nt, synthetic construct
  source 1..20: mol_type = other RNA
ctcgggaggctgaggcagga

SEQ ID NO: 2501 - RNA, 20 nt, synthetic construct
  source 1..20: mol_type = other RNA
actcgggaggctgaggcagg

SEQ ID NO: 2502 - RNA, 20 nt, synthetic construct
  source 1..20: mol_type = other RNA
tactcgggaggctgaggcag

SEQ ID NO: 2503 - RNA, 20 nt, synthetic construct
  source 1..20: mol_type = other RNA
ctactcgggaggctgaggca

SEQ ID NO: 2504 - RNA, 20 nt, synthetic construct
  source 1..20: mol_type = other RNA
gctactcgggaggctgaggc

SEQ ID NO: 2505 - RNA, 20 nt, synthetic construct
  source 1..20: mol_type = other RNA
agctactcgggaggctgagg

SEQ ID NO: 2506 - RNA, 20 nt, synthetic construct
  source 1..20: mol_type = other RNA
cagctactcgggaggctgag

SEQ ID NO: 2507 - RNA, 20 nt, synthetic construct
  source 1..20: mol_type = other RNA
ccagctactcgggaggctga

SEQ ID NO: 2508 - RNA, 20 nt, synthetic construct
  source 1..20: mol_type = other RNA
cccagctactcgggaggctg

SEQ ID NO: 2509 - RNA, 20 nt, synthetic construct
  source 1..20: mol_type = other RNA
tcccagctactcgggaggct

SEQ ID NO: 2510 - RNA, 20 nt, synthetic construct
  source 1..20: mol_type = other RNA
gtcccagctactcgggaggc

SEQ ID NO: 2511 - RNA, 20 nt, synthetic construct
  source 1..20: mol_type = other RNA
agtcccagctactcgggagg

SEQ ID NO: 2512 - RNA, 20 nt, synthetic construct
  source 1..20: mol_type = other RNA
tagtcccagctactcgggag

SEQ ID NO: 2513 - RNA, 20 nt, synthetic construct
  source 1..20: mol_type = other RNA
gtagtcccagctactcggga

SEQ ID NO: 2514 - RNA, 20 nt, synthetic construct
  source 1..20: mol_type = other RNA
tgtagtcccagctactcggg

SEQ ID NO: 2515 - RNA, 20 nt, synthetic construct
  source 1..20: mol_type = other RNA
ctgtagtcccagctactcgg

SEQ ID NO: 2516 - RNA, 20 nt, synthetic construct
  source 1..20: mol_type = other RNA
cctgtagtcccagctactcg

SEQ ID NO: 2517 - RNA, 20 nt, synthetic construct
  source 1..20: mol_type = other RNA
gcctgtagtcccagctactc

SEQ ID NO: 2518 - RNA, 20 nt, synthetic construct
  source 1..20: mol_type = other RNA
cgcctgtagtcccagctact

SEQ ID NO: 2519 - RNA, 20 nt, synthetic construct
  source 1..20: mol_type = other RNA
gcgcctgtagtcccagctac

SEQ ID NO: 2520 - RNA, 20 nt, synthetic construct
  source 1..20: mol_type = other RNA
cgcgcctgtagtcccagcta

SEQ ID NO: 2521 - RNA, 20 nt, synthetic construct
  source 1..20: mol_type = other RNA
gcgcgcctgtagtcccagct

SEQ ID NO: 2522 - RNA, 20 nt, synthetic construct
  source 1..20: mol_type = other RNA
tgcgcgcctgtagtcccagc

SEQ ID NO: 2523 - RNA, 20 nt, synthetic construct
  source 1..20: mol_type = other RNA
gtgcgcgcctgtagtcccag

SEQ ID NO: 2524 - RNA, 20 nt, synthetic construct
  source 1..20: mol_type = other RNA
ggtgcgcgcctgtagtccca

SEQ ID NO: 2525 - RNA, 20 nt, synthetic construct
  source 1..20: mol_type = other RNA
tggtgcgcgcctgtagtccc

SEQ ID NO: 2526 - RNA, 20 nt, synthetic construct
  source 1..20: mol_type = other RNA
gtggtgcgcgcctgtagtcc

SEQ ID NO: 2527 - RNA, 20 nt, synthetic construct
  source 1..20: mol_type = other RNA
ggtggtgcgcgcctgtagtc

SEQ ID NO: 2528 - RNA, 20 nt, synthetic construct
  source 1..20: mol_type = other RNA
tggtggtgcgcgcctgtagt

SEQ ID NO: 2529 - RNA, 20 nt, synthetic construct
  source 1..20: mol_type = other RNA
gtggtggtgcgcgcctgtag

SEQ ID NO: 2530 - RNA, 20 nt, synthetic construct
  source 1..20: mol_type = other RNA
cgtggtggtgcgcgcctgta

SEQ ID NO: 2531 - RNA, 20 nt, synthetic construct
  source 1..20: mol_type = other RNA
gcgtggtggtgcgcgcctgt

SEQ ID NO: 2532 - RNA, 20 nt, synthetic construct
  source 1..20: mol_type = other RNA
ggcgtggtggtgcgcgcctg

SEQ ID NO: 2533 - RNA, 20 nt, synthetic construct
  source 1..20: mol_type = other RNA
gggcgtggtggtgcgcgcct

SEQ ID NO: 2534 - RNA, 20 nt, synthetic construct
  source 1..20: mol_type = other RNA
tgggcgtggtggtgcgcgcc

SEQ ID NO: 2535 - RNA, 20 nt, synthetic construct
  source 1..20: mol_type = other RNA
ctgggcgtggtggtgcgcgc

SEQ ID NO: 2536 - RNA, 20 nt, synthetic construct
  source 1..20: mol_type = other RNA
gctgggcgtggtggtgcgcg

SEQ ID NO: 2537 - RNA, 20 nt, synthetic construct
  source 1..20: mol_type = other RNA
agctgggcgtggtggtgcgc

SEQ ID NO: 2538 - RNA, 20 nt, synthetic construct
  source 1..20: mol_type = other RNA
tagctgggcgtggtggtgcg

SEQ ID NO: 2539 - RNA, 20 nt, synthetic construct
  source 1..20: mol_type = other RNA
ttagctgggcgtggtggtgc

SEQ ID NO: 2540 - RNA, 20 nt, synthetic construct
  source 1..20: mol_type = other RNA
attagctgggcgtggtggtg

SEQ ID NO: 2541 - RNA, 20 nt, synthetic construct
  source 1..20: mol_type = other RNA
aattagctgggcgtggtggt

SEQ ID NO: 2542 - RNA, 20 nt, synthetic construct
  source 1..20: mol_type = other RNA
aaattagctgggcgtggtgg

SEQ ID NO: 2543 - RNA, 20 nt, synthetic construct
  source 1..20: mol_type = other RNA
aaaattagctgggcgtggtg

SEQ ID NO: 2544 - RNA, 20 nt, synthetic construct
  source 1..20: mol_type = other RNA
aaaaattagctgggcgtggt

SEQ ID NO: 2545 - RNA, 20 nt, synthetic construct
  source 1..20: mol_type = other RNA
caaaaattagctgggcgtgg

SEQ ID NO: 2546 - RNA, 20 nt, synthetic construct
  source 1..20: mol_type = other RNA
acaaaaattagctgggcgtg

SEQ ID NO: 2547 - RNA, 20 nt, synthetic construct
  source 1..20: mol_type = other RNA
tacaaaaattagctgggcgt

SEQ ID NO: 2548 - RNA, 20 nt, synthetic construct
  source 1..20: mol_type = other RNA
atacaaaaattagctgggcg

SEQ ID NO: 2549 - RNA, 20 nt, synthetic construct
  source 1..20: mol_type = other RNA
aatacaaaaattagctgggc

SEQ ID NO: 2550 - RNA, 20 nt, synthetic construct
  source 1..20: mol_type = other RNA
aaatacaaaaattagctggg

SEQ ID NO: 2551 - RNA, 20 nt, synthetic construct
  source 1..20: mol_type = other RNA
aaaatacaaaaattagctgg

SEQ ID NO: 2552 - RNA, 20 nt, synthetic construct
  source 1..20: mol_type = other RNA
aaaaatacaaaaattagctg

SEQ ID NO: 2553 - RNA, 20 nt, synthetic construct
  source 1..20: mol_type = other RNA
taaaaatacaaaaattagct

SEQ ID NO: 2554 - RNA, 20 nt, synthetic construct
  source 1..20: mol_type = other RNA
ctaaaaatacaaaaattagc

SEQ ID NO: 2555 - RNA, 20 nt, synthetic construct
  source 1..20: mol_type = other RNA
actaaaaatacaaaaattag

SEQ ID NO: 2556 - RNA, 20 nt, synthetic construct
  source 1..20: mol_type = other RNA
tactaaaaatacaaaaatta

SEQ ID NO: 2557 - RNA, 20 nt, synthetic construct
  source 1..20: mol_type = other RNA
ctactaaaaatacaaaaatt

SEQ ID NO: 2558 - RNA, 20 nt, synthetic construct
  source 1..20: mol_type = other RNA
tctactaaaaatacaaaaat

SEQ ID NO: 2559 - RNA, 20 nt, synthetic construct
  source 1..20: mol_type = other RNA
ctctactaaaaatacaaaaa

SEQ ID NO: 2560 - RNA, 20 nt, synthetic construct
  source 1..20: mol_type = other RNA
tctctactaaaaatacaaaa

SEQ ID NO: 2561 - RNA, 20 nt, synthetic construct
  source 1..20: mol_type = other RNA
gtctctactaaaaatacaaa

SEQ ID NO: 2562 - RNA, 20 nt, synthetic construct
  source 1..20: mol_type = other RNA
cgtctctactaaaaatacaa

SEQ ID NO: 2563 - RNA, 20 nt, synthetic construct
  source 1..20: mol_type = other RNA
ccgtctctactaaaaataca

SEQ ID NO: 2564 - RNA, 20 nt, synthetic construct
  source 1..20: mol_type = other RNA
cccgtctctactaaaaatac

SEQ ID NO: 2565 - RNA, 20 nt, synthetic construct
  source 1..20: mol_type = other RNA
ccccgtctctactaaaaata

SEQ ID NO: 2566 - RNA, 20 nt, synthetic construct
  source 1..20: mol_type = other RNA
accccgtctctactaaaaat

SEQ ID NO: 2567 - RNA, 20 nt, synthetic construct
  source 1..20: mol_type = other RNA
aaccccgtctctactaaaaa

SEQ ID NO: 2568 - RNA, 20 nt, synthetic construct
  source 1..20: mol_type = other RNA
aaaccccgtctctactaaaa

SEQ ID NO: 2569 - RNA, 20 nt, synthetic construct
  source 1..20: mol_type = other RNA
gaaaccccgtctctactaaa

SEQ ID NO: 2570 - RNA, 20 nt, synthetic construct
  source 1..20: mol_type = other RNA
tgaaaccccgtctctactaa

SEQ ID NO: 2571 - RNA, 20 nt, synthetic construct
  source 1..20: mol_type = other RNA
gtgaaaccccgtctctacta

SEQ ID NO: 2572 - RNA, 20 nt, synthetic construct
  source 1..20: mol_type = other RNA
ggtgaaaccccgtctctact

SEQ ID NO: 2573 - RNA, 20 nt, synthetic construct
  source 1..20: mol_type = other RNA
tggtgaaaccccgtctctac

SEQ ID NO: 2574 - RNA, 20 nt, synthetic construct
  source 1..20: mol_type = other RNA
atggtgaaaccccgtctcta

SEQ ID NO: 2575 - RNA, 20 nt, synthetic construct
  source 1..20: mol_type = other RNA
catggtgaaaccccgtctct

SEQ ID NO: 2576 - RNA, 20 nt, synthetic construct
  source 1..20: mol_type = other RNA
acatggtgaaaccccgtctc

SEQ ID NO: 2577 - RNA, 20 nt, synthetic construct
  source 1..20: mol_type = other RNA
aacatggtgaaaccccgtct

SEQ ID NO: 2578 - RNA, 20 nt, synthetic construct
  source 1..20: mol_type = other RNA
caacatggtgaaaccccgtc

SEQ ID NO: 2579 - RNA, 20 nt, synthetic construct
  source 1..20: mol_type = other RNA
ccaacatggtgaaaccccgt

SEQ ID NO: 2580 - RNA, 20 nt, synthetic construct
  source 1..20: mol_type = other RNA
gccaacatggtgaaaccccg

SEQ ID NO: 2581 - RNA, 20 nt, synthetic construct
  source 1..20: mol_type = other RNA
ggccaacatggtgaaacccc

SEQ ID NO: 2582 - RNA, 20 nt, synthetic construct
  source 1..20: mol_type = other RNA
tggccaacatggtgaaaccc

SEQ ID NO: 2583 - RNA, 20 nt, synthetic construct
  source 1..20: mol_type = other RNA
ctggccaacatggtgaaacc

SEQ ID NO: 2584 - RNA, 20 nt, synthetic construct
  source 1..20: mol_type = other RNA
cctggccaacatggtgaaac

SEQ ID NO: 2585 - RNA, 20 nt, synthetic construct
  source 1..20: mol_type = other RNA
tcctggccaacatggtgaaa

SEQ ID NO: 2586 - RNA, 20 nt, synthetic construct
  source 1..20: mol_type = other RNA
atcctggccaacatggtgaa

SEQ ID NO: 2587 - RNA, 20 nt, synthetic construct
  source 1..20: mol_type = other RNA
catcctggccaacatggtga

SEQ ID NO: 2588 - RNA, 20 nt, synthetic construct
  source 1..20: mol_type = other RNA
ccatcctggccaacatggtg

SEQ ID NO: 2589 - RNA, 20 nt, synthetic construct
  source 1..20: mol_type = other RNA
accatcctggccaacatggt

SEQ ID NO: 2590 - RNA, 20 nt, synthetic construct
  source 1..20: mol_type = other RNA
gaccatcctggccaacatgg

SEQ ID NO: 2591 - RNA, 20 nt, synthetic construct
  source 1..20: mol_type = other RNA
agaccatcctggccaacatg

SEQ ID NO: 2592 - RNA, 20 nt, synthetic construct
  source 1..20: mol_type = other RNA
gagaccatcctggccaacat

SEQ ID NO: 2593 - RNA, 20 nt, synthetic construct
  source 1..20: mol_type = other RNA
cgagaccatcctggccaaca

SEQ ID NO: 2594 - RNA, 20 nt, synthetic construct
  source 1..20: mol_type = other RNA
tcgagaccatcctggccaac

SEQ ID NO: 2595 - RNA, 20 nt, synthetic construct
  source 1..20: mol_type = other RNA
atcgagaccatcctggccaa

SEQ ID NO: 2596 - RNA, 20 nt, synthetic construct
  source 1..20: mol_type = other RNA
aatcgagaccatcctggcca

SEQ ID NO: 2597 - RNA, 20 nt, synthetic construct
  source 1..20: mol_type = other RNA
aaatcgagaccatcctggcc

SEQ ID NO: 2598 - RNA, 20 nt, synthetic construct
  source 1..20: mol_type = other RNA
gaaatcgagaccatcctggc

SEQ ID NO: 2599 - RNA, 20 nt, synthetic construct
  source 1..20: mol_type = other RNA
agaaatcgagaccatcctgg

SEQ ID NO: 2600 - RNA, 20 nt, synthetic construct
  source 1..20: mol_type = other RNA
aagaaatcgagaccatcctg

SEQ ID NO: 2601 - RNA, 20 nt, synthetic construct
  source 1..20: mol_type = other RNA
caagaaatcgagaccatcct

SEQ ID NO: 2602 - RNA, 20 nt, synthetic construct
  source 1..20: mol_type = other RNA
tcaagaaatcgagaccatcc

SEQ ID NO: 2603 - RNA, 20 nt, synthetic construct
  source 1..20: mol_type = other RNA
gtcaagaaatcgagaccatc

SEQ ID NO: 2604 - RNA, 20 nt, synthetic construct
  source 1..20: mol_type = other RNA
ggtcaagaaatcgagaccat

SEQ ID NO: 2605 - RNA, 20 nt, synthetic construct
  source 1..20: mol_type = other RNA
aggtcaagaaatcgagacca

SEQ ID NO: 2606 - RNA, 20 nt, synthetic construct
  source 1..20: mol_type = other RNA
gaggtcaagaaatcgagacc

SEQ ID NO: 2607 - RNA, 20 nt, synthetic construct
  source 1..20: mol_type = other RNA
cgaggtcaagaaatcgagac

SEQ ID NO: 2608 - RNA, 20 nt, synthetic construct
  source 1..20: mol_type = other RNA
acgaggtcaagaaatcgaga

SEQ ID NO: 2609 - RNA, 20 nt, synthetic construct
  source 1..20: mol_type = other RNA
cacgaggtcaagaaatcgag

SEQ ID NO: 2610 - RNA, 20 nt, synthetic construct
  source 1..20: mol_type = other RNA
tcacgaggtcaagaaatcga

SEQ ID NO: 2611 - RNA, 20 nt, synthetic construct
  source 1..20: mol_type = other RNA
atcacgaggtcaagaaatcg

SEQ ID NO: 2612 - RNA, 20 nt, synthetic construct
  source 1..20: mol_type = other RNA
gatcacgaggtcaagaaatc

SEQ ID NO: 2613 - RNA, 20 nt, synthetic construct
  source 1..20: mol_type = other RNA
ggatcacgaggtcaagaaat

SEQ ID NO: 2614 - RNA, 20 nt, synthetic construct
  source 1..20: mol_type = other RNA
cggatcacgaggtcaagaaa

SEQ ID NO: 2615 - RNA, 20 nt, synthetic construct
  source 1..20: mol_type = other RNA
gcggatcacgaggtcaagaa

SEQ ID NO: 2616 - RNA, 20 nt, synthetic construct
  source 1..20: mol_type = other RNA
ggcggatcacgaggtcaaga

SEQ ID NO: 2617 - RNA, 20 nt, synthetic construct
  source 1..20: mol_type = other RNA
gggcggatcacgaggtcaag

SEQ ID NO: 2618 - RNA, 20 nt, synthetic construct
  source 1..20: mol_type = other RNA
tgggcggatcacgaggtcaa

SEQ ID NO: 2619 - RNA, 20 nt, synthetic construct
  source 1..20: mol_type = other RNA
gtgggcggatcacgaggtca

SEQ ID NO: 2620 - RNA, 20 nt, synthetic construct
  source 1..20: mol_type = other RNA
ggtgggcggatcacgaggtc

SEQ ID NO: 2621 - RNA, 20 nt, synthetic construct
  source 1..20: mol_type = other RNA
aggtgggcggatcacgaggt

SEQ ID NO: 2622 - RNA, 20 nt, synthetic construct
  source 1..20: mol_type = other RNA
gaggtgggcggatcacgagg

SEQ ID NO: 2623 - RNA, 20 nt, synthetic construct
  source 1..20: mol_type = other RNA
cgaggtgggcggatcacgag

SEQ ID NO: 2624 - RNA, 20 nt, synthetic construct
  source 1..20: mol_type = other RNA
ccgaggtgggcggatcacga

SEQ ID NO: 2625 - RNA, 20 nt, synthetic construct
  source 1..20: mol_type = other RNA
gccgaggtgggcggatcacg

SEQ ID NO: 2626 - RNA, 20 nt, synthetic construct
  source 1..20: mol_type = other RNA
ggccgaggtgggcggatcac

SEQ ID NO: 2627 - RNA, 20 nt, synthetic construct
  source 1..20: mol_type = other RNA
aggccgaggtgggcggatca

SEQ ID NO: 2628 - RNA, 20 nt, synthetic construct
  source 1..20: mol_type = other RNA
gaggccgaggtgggcggatc

SEQ ID NO: 2629 - RNA, 20 nt, synthetic construct
  source 1..20: mol_type = other RNA
ggaggccgaggtgggcggat

SEQ ID NO: 2630 - RNA, 20 nt, synthetic construct
  source 1..20: mol_type = other RNA
gggaggccgaggtgggcgga

SEQ ID NO: 2631 - RNA, 20 nt, synthetic construct
  source 1..20: mol_type = other RNA
tgggaggccgaggtgggcgg

SEQ ID NO: 2632 - RNA, 20 nt, synthetic construct
  source 1..20: mol_type = other RNA
ttgggaggccgaggtgggcg

SEQ ID NO: 2633 - RNA, 20 nt, synthetic construct
  source 1..20: mol_type = other RNA
tttgggaggccgaggtgggc

SEQ ID NO: 2634 - RNA, 20 nt, synthetic construct
  source 1..20: mol_type = other RNA
ctttgggaggccgaggtggg

SEQ ID NO: 2635 - RNA, 20 nt, synthetic construct
  source 1..20: mol_type = other RNA
actttgggaggccgaggtgg

SEQ ID NO: 2636 - RNA, 20 nt, synthetic construct
  source 1..20: mol_type = other RNA
cactttgggaggccgaggtg

SEQ ID NO: 2637 - RNA, 20 nt, synthetic construct
  source 1..20: mol_type = other RNA
gcactttgggaggccgaggt

SEQ ID NO: 2638 - RNA, 20 nt, synthetic construct
  source 1..20: mol_type = other RNA
agcactttgggaggccgagg

SEQ ID NO: 2639 - RNA, 20 nt, synthetic construct
  source 1..20: mol_type = other RNA
tagcactttgggaggccgag

SEQ ID NO: 2640 - RNA, 20 nt, synthetic construct
  source 1..20: mol_type = other RNA
ttagcactttgggaggccga

SEQ ID NO: 2641 - RNA, 20 nt, synthetic construct
  source 1..20: mol_type = other RNA
cttagcactttgggaggccg

SEQ ID NO: 2642 - RNA, 20 nt, synthetic construct
  source 1..20: mol_type = other RNA
tcttagcactttgggaggcc

SEQ ID NO: 2643 - RNA, 20 nt, synthetic construct
  source 1..20: mol_type = other RNA
atcttagcactttgggaggc

SEQ ID NO: 2644 - RNA, 20 nt, synthetic construct
  source 1..20: mol_type = other RNA
aatcttagcactttgggagg

SEQ ID NO: 2645 - RNA, 20 nt, synthetic construct
  source 1..20: mol_type = other RNA
taatcttagcactttgggag

SEQ ID NO: 2646 - RNA, 20 nt, synthetic construct
  source 1..20: mol_type = other RNA
gtaatcttagcactttggga

SEQ ID NO: 2647 - RNA, 20 nt, synthetic construct
  source 1..20: mol_type = other RNA
tgtaatcttagcactttggg

SEQ ID NO: 2648 - RNA, 20 nt, synthetic construct
  source 1..20: mol_type = other RNA
ctgtaatcttagcactttgg

SEQ ID NO: 2649 - RNA, 20 nt, synthetic construct
  source 1..20: mol_type = other RNA
cctgtaatcttagcactttg

SEQ ID NO: 2650 - RNA, 20 nt, synthetic construct
  source 1..20: mol_type = other RNA
gcctgtaatcttagcacttt

SEQ ID NO: 2651 - RNA, 20 nt, synthetic construct
  source 1..20: mol_type = other RNA
tgcctgtaatcttagcactt

SEQ ID NO: 2652 - RNA, 20 nt, synthetic construct
  source 1..20: mol_type = other RNA
atgcctgtaatcttagcact

SEQ ID NO: 2653 - RNA, 20 nt, synthetic construct
  source 1..20: mol_type = other RNA
catgcctgtaatcttagcac

SEQ ID NO: 2654 - RNA, 20 nt, synthetic construct
  source 1..20: mol_type = other RNA
tcatgcctgtaatcttagca

SEQ ID NO: 2655 - RNA, 20 nt, synthetic construct
  source 1..20: mol_type = other RNA
ctcatgcctgtaatcttagc

SEQ ID NO: 2656 - RNA, 20 nt, synthetic construct
  source 1..20: mol_type = other RNA
gctcatgcctgtaatcttag

SEQ ID NO: 2657 - RNA, 20 nt, synthetic construct
  source 1..20: mol_type = other RNA
ggctcatgcctgtaatctta

SEQ ID NO: 2658 - RNA, 20 nt, synthetic construct
  source 1..20: mol_type = other RNA
tggctcatgcctgtaatctt

SEQ ID NO: 2659 - RNA, 20 nt, synthetic construct
  source 1..20: mol_type = other RNA
gtggctcatgcctgtaatct

SEQ ID NO: 2660 - RNA, 20 nt, synthetic construct
  source 1..20: mol_type = other RNA
ggtggctcatgcctgtaatc

SEQ ID NO: 2661 - RNA, 20 nt, synthetic construct
  source 1..20: mol_type = other RNA
cggtggctcatgcctgtaat

SEQ ID NO: 2662 - RNA, 20 nt, synthetic construct
  source 1..20: mol_type = other RNA
gcggtggctcatgcctgtaa

SEQ ID NO: 2663 - RNA, 20 nt, synthetic construct
  source 1..20: mol_type = other RNA
cgcggtggctcatgcctgta

SEQ ID NO: 2664 - RNA, 20 nt, synthetic construct
  source 1..20: mol_type = other RNA
gcgcggtggctcatgcctgt

SEQ ID NO: 2665 - RNA, 20 nt, synthetic construct
  source 1..20: mol_type = other RNA
ggcgcggtggctcatgcctg

SEQ ID NO: 2666 - RNA, 20 nt, synthetic construct
  source 1..20: mol_type = other RNA
gggcgcggtggctcatgcct

SEQ ID NO: 2667 - RNA, 20 nt, synthetic construct
  source 1..20: mol_type = other RNA
cgggcgcggtggctcatgcc

SEQ ID NO: 2668 - RNA, 20 nt, synthetic construct
  source 1..20: mol_type = other RNA
ccgggcgcggtggctcatgc

SEQ ID NO: 2669 - RNA, 20 nt, synthetic construct
  source 1..20: mol_type = other RNA
tccgggcgcggtggctcatg

SEQ ID NO: 2670 - RNA, 20 nt, synthetic construct
  source 1..20: mol_type = other RNA
gtccgggcgcggtggctcat

SEQ ID NO: 2671 - RNA, 20 nt, synthetic construct
  source 1..20: mol_type = other RNA
agtccgggcgcggtggctca

SEQ ID NO: 2672 - RNA, 20 nt, synthetic construct
  source 1..20: mol_type = other RNA
aagtccgggcgcggtggctc

SEQ ID NO: 2673 - RNA, 20 nt, synthetic construct
  source 1..20: mol_type = other RNA
caagtccgggcgcggtggct

SEQ ID NO: 2674 - RNA, 20 nt, synthetic construct
  source 1..20: mol_type = other RNA
acaagtccgggcgcggtggc

SEQ ID NO: 2675 - RNA, 20 nt, synthetic construct
  source 1..20: mol_type = other RNA
cacaagtccgggcgcggtgg

SEQ ID NO: 2676 - RNA, 20 nt, synthetic construct
  source 1..20: mol_type = other RNA
acacaagtccgggcgcggtg

SEQ ID NO: 2677 - RNA, 20 nt, synthetic construct
  source 1..20: mol_type = other RNA
cacacaagtccgggcgcggt

SEQ ID NO: 2678 - RNA, 20 nt, synthetic construct
  source 1..20: mol_type = other RNA
acacacaagtccgggcgcgg

SEQ ID NO: 2679 - RNA, 20 nt, synthetic construct
  source 1..20: mol_type = other RNA
aacacacaagtccgggcgcg

SEQ ID NO: 2680 - RNA, 20 nt, synthetic construct
  source 1..20: mol_type = other RNA
aaacacacaagtccgggcgc

SEQ ID NO: 2681 - RNA, 20 nt, synthetic construct
  source 1..20: mol_type = other RNA
caaacacacaagtccgggcg

SEQ ID NO: 2682 - RNA, 20 nt, synthetic construct
  source 1..20: mol_type = other RNA
acaaacacacaagtccgggc

SEQ ID NO: 2683 - RNA, 20 nt, synthetic construct
  source 1..20: mol_type = other RNA
aacaaacacacaagtccggg

SEQ ID NO: 2684 - RNA, 20 nt, synthetic construct
  source 1..20: mol_type = other RNA
aaacaaacacacaagtccgg

SEQ ID NO: 2685 - RNA, 20 nt, synthetic construct
  source 1..20: mol_type = other RNA
aaaacaaacacacaagtccg

SEQ ID NO: 2686 - RNA, 20 nt, synthetic construct
  source 1..20: mol_type = other RNA
taaaacaaacacacaagtcc

SEQ ID NO: 2687 - RNA, 20 nt, synthetic construct
  source 1..20: mol_type = other RNA
ctaaaacaaacacacaagtc

SEQ ID NO: 2688 - RNA, 20 nt, synthetic construct
  source 1..20: mol_type = other RNA
tctaaaacaaacacacaagt

SEQ ID NO: 2689 - RNA, 20 nt, synthetic construct
  source 1..20: mol_type = other RNA
ctctaaaacaaacacacaag

SEQ ID NO: 2690 - RNA, 20 nt, synthetic construct
  source 1..20: mol_type = other RNA
tctctaaaacaaacacacaa

SEQ ID NO: 2691 - RNA, 20 nt, synthetic construct
  source 1..20: mol_type = other RNA
gtctctaaaacaaacacaca

SEQ ID NO: 2692 - RNA, 20 nt, synthetic construct
  source 1..20: mol_type = other RNA
tgtctctaaaacaaacacac

SEQ ID NO: 2693 - RNA, 20 nt, synthetic construct
  source 1..20: mol_type = other RNA
ctgtctctaaaacaaacaca

SEQ ID NO: 2694 - RNA, 20 nt, synthetic construct
  source 1..20: mol_type = other RNA
cctgtctctaaaacaaacac

SEQ ID NO: 2695 - RNA, 20 nt, synthetic construct
  source 1..20: mol_type = other RNA
ccctgtctctaaaacaaaca

SEQ ID NO: 2696 - RNA, 20 nt, synthetic construct
  source 1..20: mol_type = other RNA
accctgtctctaaaacaaac

SEQ ID NO: 2697 - RNA, 20 nt, synthetic construct
  source 1..20: mol_type = other RNA
gaccctgtctctaaaacaaa

SEQ ID NO: 2698 - RNA, 20 nt, synthetic construct
  source 1..20: mol_type = other RNA
agaccctgtctctaaaacaa

SEQ ID NO: 2699 - RNA, 20 nt, synthetic construct
  source 1..20: mol_type = other RNA
gagaccctgtctctaaaaca

SEQ ID NO: 2700 - RNA, 20 nt, synthetic construct
  source 1..20: mol_type = other RNA
cgagaccctgtctctaaaac

SEQ ID NO: 2701 - RNA, 20 nt, synthetic construct
  source 1..20: mol_type = other RNA
gcgagaccctgtctctaaaa

SEQ ID NO: 2702 - RNA, 20 nt, synthetic construct
  source 1..20: mol_type = other RNA
agcgagaccctgtctctaaa

SEQ ID NO: 2703 - RNA, 20 nt, synthetic construct
  source 1..20: mol_type = other RNA
gagcgagaccctgtctctaa

SEQ ID NO: 2704 - RNA, 20 nt, synthetic construct
  source 1..20: mol_type = other RNA
tgagcgagaccctgtctcta

SEQ ID NO: 2705 - RNA, 20 nt, synthetic construct
  source 1..20: mol_type = other RNA
ctgagcgagaccctgtctct

SEQ ID NO: 2706 - RNA, 20 nt, synthetic construct
  source 1..20: mol_type = other RNA
actgagcgagaccctgtctc

SEQ ID NO: 2707 - RNA, 20 nt, synthetic construct
  source 1..20: mol_type = other RNA
gactgagcgagaccctgtct

SEQ ID NO: 2708 - RNA, 20 nt, synthetic construct
  source 1..20: mol_type = other RNA
cgactgagcgagaccctgtc

SEQ ID NO: 2709 - RNA, 20 nt, synthetic construct
  source 1..20: mol_type = other RNA
gcgactgagcgagaccctgt

SEQ ID NO: 2710 - RNA, 20 nt, synthetic construct
  source 1..20: mol_type = other RNA
ggcgactgagcgagaccctg

SEQ ID NO: 2711 - RNA, 20 nt, synthetic construct
  source 1..20: mol_type = other RNA
gggcgactgagcgagaccct

SEQ ID NO: 2712 - RNA, 20 nt, synthetic construct
  source 1..20: mol_type = other RNA
tgggcgactgagcgagaccc

SEQ ID NO: 2713 - RNA, 20 nt, synthetic construct
  source 1..20: mol_type = other RNA
ttgggcgactgagcgagacc

SEQ ID NO: 2714 - RNA, 20 nt, synthetic construct
  source 1..20: mol_type = other RNA
cttgggcgactgagcgagac

SEQ ID NO: 2715 - RNA, 20 nt, synthetic construct
  source 1..20: mol_type = other RNA
gcttgggcgactgagcgaga

SEQ ID NO: 2716 - RNA, 20 nt, synthetic construct
  source 1..20: mol_type = other RNA
agcttgggcgactgagcgag

SEQ ID NO: 2717 - RNA, 20 nt, synthetic construct
  source 1..20: mol_type = other RNA
cagcttgggcgactgagcga

SEQ ID NO: 2718 - RNA, 20 nt, synthetic construct
  source 1..20: mol_type = other RNA
tcagcttgggcgactgagcg

SEQ ID NO: 2719 - RNA, 20 nt, synthetic construct
  source 1..20: mol_type = other RNA
atcagcttgggcgactgagc

SEQ ID NO: 2720 - RNA, 20 nt, synthetic construct
  source 1..20: mol_type = other RNA
gatcagcttgggcgactgag

SEQ ID NO: 2721 - RNA, 20 nt, synthetic construct
  source 1..20: mol_type = other RNA
tgatcagcttgggcgactga

SEQ ID NO: 2722 - RNA, 20 nt, synthetic construct
  source 1..20: mol_type = other RNA
atgatcagcttgggcgactg

SEQ ID NO: 2723 - RNA, 20 nt, synthetic construct
  source 1..20: mol_type = other RNA
tatgatcagcttgggcgact

SEQ ID NO: 2724 - RNA, 20 nt, synthetic construct
  source 1..20: mol_type = other RNA
ctatgatcagcttgggcgac

SEQ ID NO: 2725 - RNA, 20 nt, synthetic construct
  source 1..20: mol_type = other RNA
gctatgatcagcttgggcga

SEQ ID NO: 2726 - RNA, 20 nt, synthetic construct
  source 1..20: mol_type = other RNA
agctatgatcagcttgggcg

SEQ ID NO: 2727 - RNA, 20 nt, synthetic construct
  source 1..20: mol_type = other RNA
gagctatgatcagcttgggc

SEQ ID NO: 2728 - RNA, 20 nt, synthetic construct
  source 1..20: mol_type = other RNA
tgagctatgatcagcttggg

SEQ ID NO: 2729 - RNA, 20 nt, synthetic construct
  source 1..20: mol_type = other RNA
gtgagctatgatcagcttgg

SEQ ID NO: 2730 - RNA, 20 nt, synthetic construct
  source 1..20: mol_type = other RNA
agtgagctatgatcagcttg

SEQ ID NO: 2731 - RNA, 20 nt, synthetic construct
  source 1..20: mol_type = other RNA
cagtgagctatgatcagctt

SEQ ID NO: 2732 - RNA, 20 nt, synthetic construct
  source 1..20: mol_type = other RNA
gcagtgagctatgatcagct

SEQ ID NO: 2733 - RNA, 20 nt, synthetic construct
  source 1..20: mol_type = other RNA
cgcagtgagctatgatcagc

SEQ ID NO: 2734 - RNA, 20 nt, synthetic construct
  source 1..20: mol_type = other RNA
ccgcagtgagctatgatcag

SEQ ID NO: 2735 - RNA, 20 nt, synthetic construct
  source 1..20: mol_type = other RNA
gccgcagtgagctatgatca

SEQ ID NO: 2736 - RNA, 20 nt, synthetic construct
  source 1..20: mol_type = other RNA
ggccgcagtgagctatgatc

SEQ ID NO: 2737 - RNA, 20 nt, synthetic construct
  source 1..20: mol_type = other RNA
aggccgcagtgagctatgat

SEQ ID NO: 2738 - RNA, 20 nt, synthetic construct
  source 1..20: mol_type = other RNA
caggccgcagtgagctatga

SEQ ID NO: 2739 - RNA, 20 nt, synthetic construct
  source 1..20: mol_type = other RNA
gcaggccgcagtgagctatg

SEQ ID NO: 2740 - RNA, 20 nt, synthetic construct
  source 1..20: mol_type = other RNA
tgcaggccgcagtgagctat

SEQ ID NO: 2741 - RNA, 20 nt, synthetic construct
  source 1..20: mol_type = other RNA
ttgcaggccgcagtgagcta

SEQ ID NO: 2742 - RNA, 20 nt, synthetic construct
  source 1..20: mol_type = other RNA
gttgcaggccgcagtgagct

SEQ ID NO: 2743 - RNA, 20 nt, synthetic construct
  source 1..20: mol_type = other RNA
agttgcaggccgcagtgagc

SEQ ID NO: 2744 - RNA, 20 nt, synthetic construct
  source 1..20: mol_type = other RNA
gagttgcaggccgcagtgag

SEQ ID NO: 2745 - RNA, 20 nt, synthetic construct
  source 1..20: mol_type = other RNA
ggagttgcaggccgcagtga

SEQ ID NO: 2746 - RNA, 20 nt, synthetic construct
  source 1..20: mol_type = other RNA
aggagttgcaggccgcagtg

SEQ ID NO: 2747 - RNA, 20 nt, synthetic construct
  source 1..20: mol_type = other RNA
caggagttgcaggccgcagt

SEQ ID NO: 2748 - RNA, 20 nt, synthetic construct
  source 1..20: mol_type = other RNA
gcaggagttgcaggccgcag

SEQ ID NO: 2749 - RNA, 20 nt, synthetic construct
  source 1..20: mol_type = other RNA
agcaggagttgcaggccgca

SEQ ID NO: 2750 - RNA, 20 nt, synthetic construct
  source 1..20: mol_type = other RNA
gagcaggagttgcaggccgc

SEQ ID NO: 2751 - RNA, 20 nt, synthetic construct
  source 1..20: mol_type = other RNA
ggagcaggagttgcaggccg

SEQ ID NO: 2752 - RNA, 20 nt, synthetic construct
  source 1..20: mol_type = other RNA
gggagcaggagttgcaggcc

SEQ ID NO: 2753 - RNA, 20 nt, synthetic construct
  source 1..20: mol_type = other RNA
tgggagcaggagttgcaggc

SEQ ID NO: 2754 - RNA, 20 nt, synthetic construct
  source 1..20: mol_type = other RNA
ttgggagcaggagttgcagg

SEQ ID NO: 2755 - RNA, 20 nt, synthetic construct
  source 1..20: mol_type = other RNA
tttgggagcaggagttgcag

SEQ ID NO: 2756 - RNA, 20 nt, synthetic construct
  source 1..20: mol_type = other RNA
ctttgggagcaggagttgca

SEQ ID NO: 2757 - RNA, 20 nt, synthetic construct
  source 1..20: mol_type = other RNA
gctttgggagcaggagttgc

SEQ ID NO: 2758 - RNA, 20 nt, synthetic construct
  source 1..20: mol_type = other RNA
cgctttgggagcaggagttg

SEQ ID NO: 2759 - RNA, 20 nt, synthetic construct
  source 1..20: mol_type = other RNA
tcgctttgggagcaggagtt

SEQ ID NO: 2760 - RNA, 20 nt, synthetic construct
  source 1..20: mol_type = other RNA
atcgctttgggagcaggagt

SEQ ID NO: 2761 - RNA, 20 nt, synthetic construct
  source 1..20: mol_type = other RNA
aatcgctttgggagcaggag

SEQ ID NO: 2762 - RNA, 20 nt, synthetic construct
  source 1..20: mol_type = other RNA
gaatcgctttgggagcagga

SEQ ID NO: 2763 - RNA, 20 nt, synthetic construct
  source 1..20: mol_type = other RNA
agaatcgctttgggagcagg

SEQ ID NO: 2764 - RNA, 20 nt, synthetic construct
  source 1..20: mol_type = other RNA
gagaatcgctttgggagcag

SEQ ID NO: 2765 - RNA, 20 nt, synthetic construct
  source 1..20: mol_type = other RNA
ggagaatcgctttgggagca

SEQ ID NO: 2766 - RNA, 20 nt, synthetic construct
  source 1..20: mol_type = other RNA
aggagaatcgctttgggagc

SEQ ID NO: 2767 - RNA, 20 nt, synthetic construct
  source 1..20: mol_type = other RNA
taggagaatcgctttgggag

SEQ ID NO: 2768 - RNA, 20 nt, synthetic construct
  source 1..20: mol_type = other RNA
gtaggagaatcgctttggga

SEQ ID NO: 2769 - RNA, 20 nt, synthetic construct
  source 1..20: mol_type = other RNA
ggtaggagaatcgctttggg

SEQ ID NO: 2770 - RNA, 20 nt, synthetic construct
  source 1..20: mol_type = other RNA
cggtaggagaatcgctttgg

SEQ ID NO: 2771 - RNA, 20 nt, synthetic construct
  source 1..20: mol_type = other RNA
gcggtaggagaatcgctttg

SEQ ID NO: 2772 - RNA, 20 nt, synthetic construct
  source 1..20: mol_type = other RNA
tgcggtaggagaatcgcttt

SEQ ID NO: 2773 - RNA, 20 nt, synthetic construct
  source 1..20: mol_type = other RNA
ctgcggtaggagaatcgctt

SEQ ID NO: 2774 - RNA, 20 nt, synthetic construct
  source 1..20: mol_type = other RNA
gctgcggtaggagaatcgct

SEQ ID NO: 2775 - RNA, 20 nt, synthetic construct
  source 1..20: mol_type = other RNA
ggctgcggtaggagaatcgc

SEQ ID NO: 2776 - RNA, 20 nt, synthetic construct
  source 1..20: mol_type = other RNA
gggctgcggtaggagaatcg

SEQ ID NO: 2777 - RNA, 20 nt, synthetic construct
  source 1..20: mol_type = other RNA
ggggctgcggtaggagaatc

SEQ ID NO: 2778 - RNA, 20 nt, synthetic construct
  source 1..20: mol_type = other RNA
gggggctgcggtaggagaat

SEQ ID NO: 2779 - RNA, 20 nt, synthetic construct
  source 1..20: mol_type = other RNA
ggggggctgcggtaggagaa

SEQ ID NO: 2780 - RNA, 20 nt, synthetic construct
  source 1..20: mol_type = other RNA
tggggggctgcggtaggaga

SEQ ID NO: 2781 - RNA, 20 nt, synthetic construct
  source 1..20: mol_type = other RNA
ttggggggctgcggtaggag

SEQ ID NO: 2782 - RNA, 20 nt, synthetic construct
  source 1..20: mol_type = other RNA
cttggggggctgcggtagga

SEQ ID NO: 2783 - RNA, 20 nt, synthetic construct
  source 1..20: mol_type = other RNA
ccttggggggctgcggtagg

SEQ ID NO: 2784 - RNA, 20 nt, synthetic construct
  source 1..20: mol_type = other RNA
gccttggggggctgcggtag

SEQ ID NO: 2785 - RNA, 20 nt, synthetic construct
  source 1..20: mol_type = other RNA
cgccttggggggctgcggta

SEQ ID NO: 2786 - RNA, 20 nt, synthetic construct
  source 1..20: mol_type = other RNA
gcgccttggggggctgcggt

SEQ ID NO: 2787 - RNA, 20 nt, synthetic construct
  source 1..20: mol_type = other RNA
agcgccttggggggctgcgg

SEQ ID NO: 2788 - RNA, 20 nt, synthetic construct
  source 1..20: mol_type = other RNA
cagcgccttggggggctgcg

SEQ ID NO: 2789 - RNA, 20 nt, synthetic construct
  source 1..20: mol_type = other RNA
ccagcgccttggggggctgc

SEQ ID NO: 2790 - RNA, 20 nt, synthetic construct
  source 1..20: mol_type = other RNA
cccagcgccttggggggctg

SEQ ID NO: 2791 - RNA, 20 nt, synthetic construct
  source 1..20: mol_type = other RNA
tcccagcgccttggggggct

SEQ ID NO: 2792 - RNA, 20 nt, synthetic construct
  source 1..20: mol_type = other RNA
atcccagcgccttggggggc

SEQ ID NO: 2793 - RNA, 20 nt, synthetic construct
  source 1..20: mol_type = other RNA
aatcccagcgccttgggggg

SEQ ID NO: 2794 - RNA, 20 nt, synthetic construct
  source 1..20: mol_type = other RNA
taatcccagcgccttggggg

SEQ ID NO: 2795 - RNA, 20 nt, synthetic construct
  source 1..20: mol_type = other RNA
gtaatcccagcgccttgggg

SEQ ID NO: 2796 - RNA, 20 nt, synthetic construct
  source 1..20: mol_type = other RNA
tgtaatcccagcgccttggg

SEQ ID NO: 2797 - RNA, 20 nt, synthetic construct
  source 1..20: mol_type = other RNA
ttgtaatcccagcgccttgg

SEQ ID NO: 2798 - RNA, 20 nt, synthetic construct
  source 1..20: mol_type = other RNA
tttgtaatcccagcgccttg

SEQ ID NO: 2799 - RNA, 20 nt, synthetic construct
  source 1..20: mol_type = other RNA
atttgtaatcccagcgcctt

SEQ ID NO: 2800 - RNA, 20 nt, synthetic construct
  source 1..20: mol_type = other RNA
catttgtaatcccagcgcct

SEQ ID NO: 2801 - RNA, 20 nt, synthetic construct
  source 1..20: mol_type = other RNA
acatttgtaatcccagcgcc

SEQ ID NO: 2802 - RNA, 20 nt, synthetic construct
  source 1..20: mol_type = other RNA
cacatttgtaatcccagcgc

SEQ ID NO: 2803 - RNA, 20 nt, synthetic construct
  source 1..20: mol_type = other RNA
tcacatttgtaatcccagcg

SEQ ID NO: 2804 - RNA, 20 nt, synthetic construct
  source 1..20: mol_type = other RNA
ctcacatttgtaatcccagc

SEQ ID NO: 2805 - RNA, 20 nt, synthetic construct
  source 1..20: mol_type = other RNA
gctcacatttgtaatcccag

SEQ ID NO: 2806 - RNA, 20 nt, synthetic construct
  source 1..20: mol_type = other RNA
agctcacatttgtaatccca

SEQ ID NO: 2807 - RNA, 20 nt, synthetic construct
  source 1..20: mol_type = other RNA
tagctcacatttgtaatccc

SEQ ID NO: 2808 - RNA, 20 nt, synthetic construct
  source 1..20: mol_type = other RNA
gtagctcacatttgtaatcc

SEQ ID NO: 2809 - RNA, 20 nt, synthetic construct
  source 1..20: mol_type = other RNA
agtagctcacatttgtaatc

SEQ ID NO: 2810 - RNA, 20 nt, synthetic construct
  source 1..20: mol_type = other RNA
cagtagctcacatttgtaat

SEQ ID NO: 2811 - RNA, 20 nt, synthetic construct
  source 1..20: mol_type = other RNA
tcagtagctcacatttgtaa

SEQ ID NO: 2812 - RNA, 20 nt, synthetic construct
  source 1..20: mol_type = other RNA
ctcagtagctcacatttgta

SEQ ID NO: 2813 - RNA, 20 nt, synthetic construct
  source 1..20: mol_type = other RNA
gctcagtagctcacatttgt

SEQ ID NO: 2814 - RNA, 20 nt, synthetic construct
  source 1..20: mol_type = other RNA
agctcagtagctcacatttg

SEQ ID NO: 2815 - RNA, 20 nt, synthetic construct
  source 1..20: mol_type = other RNA
cagctcagtagctcacattt

SEQ ID NO: 2816 - RNA, 20 nt, synthetic construct
  source 1..20: mol_type = other RNA
ccagctcagtagctcacatt

SEQ ID NO: 2817 - RNA, 20 nt, synthetic construct
  source 1..20: mol_type = other RNA
gccagctcagtagctcacat

SEQ ID NO: 2818 - RNA, 20 nt, synthetic construct
  source 1..20: mol_type = other RNA
agccagctcagtagctcaca

SEQ ID NO: 2819 - RNA, 20 nt, synthetic construct
  source 1..20: mol_type = other RNA
gagccagctcagtagctcac

SEQ ID NO: 2820 - RNA, 20 nt, synthetic construct
  source 1..20: mol_type = other RNA
cgagccagctcagtagctca

SEQ ID NO: 2821 - RNA, 20 nt, synthetic construct
  source 1..20: mol_type = other RNA
gcgagccagctcagtagctc

SEQ ID NO: 2822 - RNA, 20 nt, synthetic construct
  source 1..20: mol_type = other RNA
agcgagccagctcagtagct

SEQ ID NO: 2823 - RNA, 20 nt, synthetic construct
  source 1..20: mol_type = other RNA
gagcgagccagctcagtagc

SEQ ID NO: 2824 - RNA, 20 nt, synthetic construct
  source 1..20: mol_type = other RNA
ggagcgagccagctcagtag

SEQ ID NO: 2825 - RNA, 20 nt, synthetic construct
  source 1..20: mol_type = other RNA
aggagcgagccagctcagta

SEQ ID NO: 2826 - RNA, 20 nt, synthetic construct
  source 1..20: mol_type = other RNA
taggagcgagccagctcagt

SEQ ID NO: 2827 - RNA, 20 nt, synthetic construct
  source 1..20: mol_type = other RNA
ataggagcgagccagctcag

SEQ ID NO: 2828 - RNA, 20 nt, synthetic construct
  source 1..20: mol_type = other RNA
gataggagcgagccagctca

SEQ ID NO: 2829 - RNA, 20 nt, synthetic construct
  source 1..20: mol_type = other RNA
ggataggagcgagccagctc

SEQ ID NO: 2830 - RNA, 20 nt, synthetic construct
  source 1..20: mol_type = other RNA
aggataggagcgagccagct

SEQ ID NO: 2831 - RNA, 20 nt, synthetic construct
  source 1..20: mol_type = other RNA
taggataggagcgagccagc

SEQ ID NO: 2832 - RNA, 20 nt, synthetic construct
  source 1..20: mol_type = other RNA
ataggataggagcgagccag

SEQ ID NO: 2833 - RNA, 20 nt, synthetic construct
  source 1..20: mol_type = other RNA
gataggataggagcgagcca

SEQ ID NO: 2834 - RNA, 20 nt, synthetic construct
  source 1..20: mol_type = other RNA
ggataggataggagcgagcc

SEQ ID NO: 2835 - RNA, 20 nt, synthetic construct
  source 1..20: mol_type = other RNA
aggataggataggagcgagc

SEQ ID NO: 2836 - RNA, 20 nt, synthetic construct
  source 1..20: mol_type = other RNA
caggataggataggagcgag

SEQ ID NO: 2837 - RNA, 20 nt, synthetic construct
  source 1..20: mol_type = other RNA
gcaggataggataggagcga

SEQ ID NO: 2838 - RNA, 20 nt, synthetic construct
  source 1..20: mol_type = other RNA
ggcaggataggataggagcg

SEQ ID NO: 2839 - RNA, 20 nt, synthetic construct
  source 1..20: mol_type = other RNA
gggcaggataggataggagc

SEQ ID NO: 2840 - RNA, 20 nt, synthetic construct
  source 1..20: mol_type = other RNA
agggcaggataggataggag

SEQ ID NO: 2841 - RNA, 20 nt, synthetic construct
  source 1..20: mol_type = other RNA
cagggcaggataggatagga

SEQ ID NO: 2842 - RNA, 20 nt, synthetic construct
  source 1..20: mol_type = other RNA
acagggcaggataggatagg

SEQ ID NO: 2843 - RNA, 20 nt, synthetic construct
  source 1..20: mol_type = other RNA
gacagggcaggataggatag

SEQ ID NO: 2844 - RNA, 20 nt, synthetic construct
  source 1..20: mol_type = other RNA
agacagggcaggataggata

SEQ ID NO: 2845 - RNA, 20 nt, synthetic construct
  source 1..20: mol_type = other RNA
aagacagggcaggataggat

SEQ ID NO: 2846 - RNA, 20 nt, synthetic construct
  source 1..20: mol_type = other RNA
caagacagggcaggatagga

SEQ ID NO: 2847 - RNA, 20 nt, synthetic construct
  source 1..20: mol_type = other RNA
acaagacagggcaggatagg

SEQ ID NO: 2848 - RNA, 20 nt, synthetic construct
  source 1..20: mol_type = other RNA
gacaagacagggcaggatag

SEQ ID NO: 2849 - RNA, 20 nt, synthetic construct
  source 1..20: mol_type = other RNA
ggacaagacagggcaggata

SEQ ID NO: 2850 - RNA, 20 nt, synthetic construct
  source 1..20: mol_type = other RNA
aggacaagacagggcaggat

SEQ ID NO: 2851 - RNA, 20 nt, synthetic construct
  source 1..20: mol_type = other RNA
caggacaagacagggcagga

SEQ ID NO: 2852 - RNA, 20 nt, synthetic construct
  source 1..20: mol_type = other RNA
acaggacaagacagggcagg

SEQ ID NO: 2853 - RNA, 20 nt, synthetic construct
  source 1..20: mol_type = other RNA
gacaggacaagacagggcag

SEQ ID NO: 2854 - RNA, 20 nt, synthetic construct
  source 1..20: mol_type = other RNA
ggacaggacaagacagggca

SEQ ID NO: 2855 - RNA, 20 nt, synthetic construct
  source 1..20: mol_type = other RNA
aggacaggacaagacagggc

SEQ ID NO: 2856 - RNA, 20 nt, synthetic construct
  source 1..20: mol_type = other RNA
caggacaggacaagacaggg

SEQ ID NO: 2857 - RNA, 20 nt, synthetic construct
  source 1..20: mol_type = other RNA
acaggacaggacaagacagg

SEQ ID NO: 2858 - RNA, 20 nt, synthetic construct
  source 1..20: mol_type = other RNA
gacaggacaggacaagacag

SEQ ID NO: 2859 - RNA, 20 nt, synthetic construct
  source 1..20: mol_type = other RNA
ggacaggacaggacaagaca

SEQ ID NO: 2860 - RNA, 20 nt, synthetic construct
  source 1..20: mol_type = other RNA
aggacaggacaggacaagac

SEQ ID NO: 2861 - RNA, 20 nt, synthetic construct
  source 1..20: mol_type = other RNA
caggacaggacaggacaaga

SEQ ID NO: 2862 - RNA, 20 nt, synthetic construct
  source 1..20: mol_type = other RNA
gcaggacaggacaggacaag

SEQ ID NO: 2863 - RNA, 20 nt, synthetic construct
  source 1..20: mol_type = other RNA
ggcaggacaggacaggacaa

SEQ ID NO: 2864 - RNA, 20 nt, synthetic construct
  source 1..20: mol_type = other RNA
gggcaggacaggacaggaca

SEQ ID NO: 2865 - RNA, 20 nt, synthetic construct
  source 1..20: mol_type = other RNA
agggcaggacaggacaggac

SEQ ID NO: 2866 - RNA, 20 nt, synthetic construct
  source 1..20: mol_type = other RNA
tagggcaggacaggacagga

SEQ ID NO: 2867 - RNA, 20 nt, synthetic construct
  source 1..20: mol_type = other RNA
atagggcaggacaggacagg

SEQ ID NO: 2868 - RNA, 20 nt, synthetic construct
  source 1..20: mol_type = other RNA
aatagggcaggacaggacag

SEQ ID NO: 2869 - RNA, 20 nt, synthetic construct
  source 1..20: mol_type = other RNA
gaatagggcaggacaggaca

SEQ ID NO: 2870 - RNA, 20 nt, synthetic construct
  source 1..20: mol_type = other RNA
agaatagggcaggacaggac

SEQ ID NO: 2871 - RNA, 20 nt, synthetic construct
  source 1..20: mol_type = other RNA
cagaatagggcaggacagga

SEQ ID NO: 2872 - RNA, 20 nt, synthetic construct
  source 1..20: mol_type = other RNA
gcagaatagggcaggacagg

SEQ ID NO: 2873 - RNA, 20 nt, synthetic construct
  source 1..20: mol_type = other RNA
ggcagaatagggcaggacag

SEQ ID NO: 2874 - RNA, 20 nt, synthetic construct
  source 1..20: mol_type = other RNA
gggcagaatagggcaggaca

SEQ ID NO: 2875 - RNA, 20 nt, synthetic construct
  source 1..20: mol_type = other RNA
agggcagaatagggcaggac

SEQ ID NO: 2876 - RNA, 20 nt, synthetic construct
  source 1..20: mol_type = other RNA
tagggcagaatagggcagga

SEQ ID NO: 2877 - RNA, 20 nt, synthetic construct
  source 1..20: mol_type = other RNA
atagggcagaatagggcagg

SEQ ID NO: 2878 - RNA, 20 nt, synthetic construct
  source 1..20: mol_type = other RNA
aatagggcagaatagggcag

SEQ ID NO: 2879 - RNA, 20 nt, synthetic construct
  source 1..20: mol_type = other RNA
gaatagggcagaatagggca

SEQ ID NO: 2880 - RNA, 20 nt, synthetic construct
  source 1..20: mol_type = other RNA
agaatagggcagaatagggc

SEQ ID NO: 2881 - RNA, 20 nt, synthetic construct
  source 1..20: mol_type = other RNA
gagaatagggcagaataggg

SEQ ID NO: 2882 - RNA, 20 nt, synthetic construct
  source 1..20: mol_type = other RNA
ggagaatagggcagaatagg

SEQ ID NO: 2883 - RNA, 20 nt, synthetic construct
  source 1..20: mol_type = other RNA
tggagaatagggcagaatag

SEQ ID NO: 2884 - RNA, 20 nt, synthetic construct
  source 1..20: mol_type = other RNA
ttggagaatagggcagaata

SEQ ID NO: 2885 - RNA, 20 nt, synthetic construct
  source 1..20: mol_type = other RNA
tttggagaatagggcagaat

SEQ ID NO: 2886 - RNA, 20 nt, synthetic construct
  source 1..20: mol_type = other RNA
gtttggagaatagggcagaa

SEQ ID NO: 2887 - RNA, 20 nt, synthetic construct
  source 1..20: mol_type = other RNA
agtttggagaatagggcaga

SEQ ID NO: 2888 - RNA, 20 nt, synthetic construct
  source 1..20: mol_type = other RNA
gagtttggagaatagggcag

SEQ ID NO: 2889 - RNA, 20 nt, synthetic construct
  source 1..20: mol_type = other RNA
cgagtttggagaatagggca

SEQ ID NO: 2890 - RNA, 20 nt, synthetic construct
  source 1..20: mol_type = other RNA
ccgagtttggagaatagggc

SEQ ID NO: 2891 - RNA, 20 nt, synthetic construct
  source 1..20: mol_type = other RNA
accgagtttggagaataggg

SEQ ID NO: 2892 - RNA, 20 nt, synthetic construct
  source 1..20: mol_type = other RNA
aaccgagtttggagaatagg

SEQ ID NO: 2893 - RNA, 20 nt, synthetic construct
  source 1..20: mol_type = other RNA
caaccgagtttggagaatag

SEQ ID NO: 2894 - RNA, 20 nt, synthetic construct
  source 1..20: mol_type = other RNA
tcaaccgagtttggagaata

SEQ ID NO: 2895 - RNA, 20 nt, synthetic construct
  source 1..20: mol_type = other RNA
gtcaaccgagtttggagaat

SEQ ID NO: 2896 - RNA, 20 nt, synthetic construct
  source 1..20: mol_type = other RNA
tgtcaaccgagtttggagaa

SEQ ID NO: 2897 - RNA, 20 nt, synthetic construct
  source 1..20: mol_type = other RNA
atgtcaaccgagtttggaga

SEQ ID NO: 2898 - RNA, 20 nt, synthetic construct
  source 1..20: mol_type = other RNA
catgtcaaccgagtttggag

SEQ ID NO: 2899 - RNA, 20 nt, synthetic construct
  source 1..20: mol_type = other RNA
gcatgtcaaccgagtttgga

SEQ ID NO: 2900 - RNA, 20 nt, synthetic construct
  source 1..20: mol_type = other RNA
agcatgtcaaccgagtttgg

SEQ ID NO: 2901 - RNA, 20 nt, synthetic construct
  source 1..20: mol_type = other RNA
tagcatgtcaaccgagtttg

SEQ ID NO: 2902 - RNA, 20 nt, synthetic construct
  source 1..20: mol_type = other RNA
ctagcatgtcaaccgagttt

SEQ ID NO: 2903 - RNA, 20 nt, synthetic construct
  source 1..20: mol_type = other RNA
cctagcatgtcaaccgagtt

SEQ ID NO: 2904 - RNA, 20 nt, synthetic construct
  source 1..20: mol_type = other RNA
gcctagcatgtcaaccgagt

SEQ ID NO: 2905 - RNA, 20 nt, synthetic construct
  source 1..20: mol_type = other RNA
tgcctagcatgtcaaccgag

SEQ ID NO: 2906 - RNA, 20 nt, synthetic construct
  source 1..20: mol_type = other RNA
ctgcctagcatgtcaaccga

SEQ ID NO: 2907 - RNA, 20 nt, synthetic construct
  source 1..20: mol_type = other RNA
cctgcctagcatgtcaaccg

SEQ ID NO: 2908 - RNA, 20 nt, synthetic construct
  source 1..20: mol_type = other RNA
gcctgcctagcatgtcaacc

SEQ ID NO: 2909 - RNA, 20 nt, synthetic construct
  source 1..20: mol_type = other RNA
ggcctgcctagcatgtcaac

SEQ ID NO: 2910 - RNA, 20 nt, synthetic construct
  source 1..20: mol_type = other RNA
gggcctgcctagcatgtcaa

SEQ ID NO: 2911 - RNA, 20 nt, synthetic construct
  source 1..20: mol_type = other RNA
ggggcctgcctagcatgtca

SEQ ID NO: 2912 - RNA, 20 nt, synthetic construct
  source 1..20: mol_type = other RNA
tggggcctgcctagcatgtc

SEQ ID NO: 2913 - RNA, 20 nt, synthetic construct
  source 1..20: mol_type = other RNA
ctggggcctgcctagcatgt

SEQ ID NO: 2914 - RNA, 20 nt, synthetic construct
  source 1..20: mol_type = other RNA
tctggggcctgcctagcatg

SEQ ID NO: 2915 - RNA, 20 nt, synthetic construct
  source 1..20: mol_type = other RNA
ctctggggcctgcctagcat

SEQ ID NO: 2916 - RNA, 20 nt, synthetic construct
  source 1..20: mol_type = other RNA
actctggggcctgcctagca

SEQ ID NO: 2917 - RNA, 20 nt, synthetic construct
  source 1..20: mol_type = other RNA
cactctggggcctgcctagc

SEQ ID NO: 2918 - RNA, 20 nt, synthetic construct
  source 1..20: mol_type = other RNA
tcactctggggcctgcctag

SEQ ID NO: 2919 - RNA, 20 nt, synthetic construct
  source 1..20: mol_type = other RNA
ctcactctggggcctgccta

SEQ ID NO: 2920 - RNA, 20 nt, synthetic construct
  source 1..20: mol_type = other RNA
actcactctggggcctgcct

SEQ ID NO: 2921 - RNA, 20 nt, synthetic construct
  source 1..20: mol_type = other RNA
aactcactctggggcctgcc

SEQ ID NO: 2922 - RNA, 20 nt, synthetic construct
  source 1..20: mol_type = other RNA
caactcactctggggcctgc

SEQ ID NO: 2923 - RNA, 20 nt, synthetic construct
  source 1..20: mol_type = other RNA
tcaactcactctggggcctg

SEQ ID NO: 2924 - RNA, 20 nt, synthetic construct
  source 1..20: mol_type = other RNA
ttcaactcactctggggcct

SEQ ID NO: 2925 - RNA, 20 nt, synthetic construct
  source 1..20: mol_type = other RNA
cttcaactcactctggggcc

SEQ ID NO: 2926 - RNA, 20 nt, synthetic construct
  source 1..20: mol_type = other RNA
ccttcaactcactctggggc

SEQ ID NO: 2927 - RNA, 20 nt, synthetic construct
  source 1..20: mol_type = other RNA
tccttcaactcactctgggg

SEQ ID NO: 2928 - RNA, 20 nt, synthetic construct
  source 1..20: mol_type = other RNA
atccttcaactcactctggg

SEQ ID NO: 2929 - RNA, 20 nt, synthetic construct
  source 1..20: mol_type = other RNA
catccttcaactcactctgg

SEQ ID NO: 2930 - RNA, 20 nt, synthetic construct
  source 1..20: mol_type = other RNA
ccatccttcaactcactctg

SEQ ID NO: 2931 - RNA, 20 nt, synthetic construct
  source 1..20: mol_type = other RNA
accatccttcaactcactct

SEQ ID NO: 2932 - RNA, 20 nt, synthetic construct
  source 1..20: mol_type = other RNA
aaccatccttcaactcactc

SEQ ID NO: 2933 - RNA, 20 nt, synthetic construct
  source 1..20: mol_type = other RNA
aaaccatccttcaactcact

SEQ ID NO: 2934 - RNA, 20 nt, synthetic construct
  source 1..20: mol_type = other RNA
gaaaccatccttcaactcac

SEQ ID NO: 2935 - RNA, 20 nt, synthetic construct
  source 1..20: mol_type = other RNA
ggaaaccatccttcaactca

SEQ ID NO: 2936 - RNA, 20 nt, synthetic construct
  source 1..20: mol_type = other RNA
tggaaaccatccttcaactc

SEQ ID NO: 2937 - RNA, 20 nt, synthetic construct
  source 1..20: mol_type = other RNA
ctggaaaccatccttcaact

SEQ ID NO: 2938 - RNA, 20 nt, synthetic construct
  source 1..20: mol_type = other RNA
cctggaaaccatccttcaac

SEQ ID NO: 2939 - RNA, 20 nt, synthetic construct
  source 1..20: mol_type = other RNA
tcctggaaaccatccttcaa

SEQ ID NO: 2940 - RNA, 20 nt, synthetic construct
  source 1..20: mol_type = other RNA
gtcctggaaaccatccttca

SEQ ID NO: 2941 - RNA, 20 nt, synthetic construct
  source 1..20: mol_type = other RNA
tgtcctggaaaccatccttc

SEQ ID NO: 2942 - RNA, 20 nt, synthetic construct
  source 1..20: mol_type = other RNA
ttgtcctggaaaccatcctt

SEQ ID NO: 2943 - RNA, 20 nt, synthetic construct
  source 1..20: mol_type = other RNA
tttgtcctggaaaccatcct

SEQ ID NO: 2944 - RNA, 20 nt, synthetic construct
  source 1..20: mol_type = other RNA
ctttgtcctggaaaccatcc

SEQ ID NO: 2945 - RNA, 20 nt, synthetic construct
  source 1..20: mol_type = other RNA
tctttgtcctggaaaccatc

SEQ ID NO: 2946 - RNA, 20 nt, synthetic construct
  source 1..20: mol_type = other RNA
atctttgtcctggaaaccat

SEQ ID NO: 2947 - RNA, 20 nt, synthetic construct
  source 1..20: mol_type = other RNA
tatctttgtcctggaaacca

SEQ ID NO: 2948 - RNA, 20 nt, synthetic construct
  source 1..20: mol_type = other RNA
ttatctttgtcctggaaacc

SEQ ID NO: 2949 - RNA, 20 nt, synthetic construct
  source 1..20: mol_type = other RNA
tttatctttgtcctggaaac

SEQ ID NO: 2950 - RNA, 20 nt, synthetic construct
  source 1..20: mol_type = other RNA
gtttatctttgtcctggaaa

SEQ ID NO: 2951 - RNA, 20 nt, synthetic construct
  source 1..20: mol_type = other RNA
tgtttatctttgtcctggaa

SEQ ID NO: 2952 - RNA, 20 nt, synthetic construct
  source 1..20: mol_type = other RNA
ctgtttatctttgtcctgga

SEQ ID NO: 2953 - RNA, 20 nt, synthetic construct
  source 1..20: mol_type = other RNA
gctgtttatctttgtcctgg

SEQ ID NO: 2954 - RNA, 20 nt, synthetic construct
  source 1..20: mol_type = other RNA
ggctgtttatctttgtcctg

SEQ ID NO: 2955 - RNA, 20 nt, synthetic construct
  source 1..20: mol_type = other RNA
gggctgtttatctttgtcct

SEQ ID NO: 2956 - RNA, 20 nt, synthetic construct
  source 1..20: mol_type = other RNA
ggggctgtttatctttgtcc

SEQ ID NO: 2957 - RNA, 20 nt, synthetic construct
  source 1..20: mol_type = other RNA
tggggctgtttatctttgtc

SEQ ID NO: 2958 - RNA, 20 nt, synthetic construct
  source 1..20: mol_type = other RNA
ttggggctgtttatctttgt

SEQ ID NO: 2959 - RNA, 20 nt, synthetic construct
  source 1..20: mol_type = other RNA
tttggggctgtttatctttg

SEQ ID NO: 2960 - RNA, 20 nt, synthetic construct
  source 1..20: mol_type = other RNA
ctttggggctgtttatcttt

SEQ ID NO: 2961 - RNA, 20 nt, synthetic construct
  source 1..20: mol_type = other RNA
gctttggggctgtttatctt

SEQ ID NO: 2962 - RNA, 20 nt, synthetic construct
  source 1..20: mol_type = other RNA
ggctttggggctgtttatct

SEQ ID NO: 2963 - RNA, 20 nt, synthetic construct
  source 1..20: mol_type = other RNA
gggctttggggctgtttatc

SEQ ID NO: 2964 - RNA, 20 nt, synthetic construct
  source 1..20: mol_type = other RNA
agggctttggggctgtttat

SEQ ID NO: 2965 - RNA, 20 nt, synthetic construct
  source 1..20: mol_type = other RNA
aagggctttggggctgttta

SEQ ID NO: 2966 - RNA, 20 nt, synthetic construct
  source 1..20: mol_type = other RNA
aaagggctttggggctgttt

SEQ ID NO: 2967 - RNA, 20 nt, synthetic construct
  source 1..20: mol_type = other RNA
gaaagggctttggggctgtt

SEQ ID NO: 2968 - RNA, 20 nt, synthetic construct
  source 1..20: mol_type = other RNA
ggaaagggctttggggctgt

SEQ ID NO: 2969 - RNA, 20 nt, synthetic construct
  source 1..20: mol_type = other RNA
aggaaagggctttggggctg

SEQ ID NO: 2970 - RNA, 20 nt, synthetic construct
  source 1..20: mol_type = other RNA
gaggaaagggctttggggct

SEQ ID NO: 2971 - RNA, 20 nt, synthetic construct
  source 1..20: mol_type = other RNA
tgaggaaagggctttggggc

SEQ ID NO: 2972 - RNA, 20 nt, synthetic construct
  source 1..20: mol_type = other RNA
ttgaggaaagggctttgggg

SEQ ID NO: 2973 - RNA, 20 nt, synthetic construct
  source 1..20: mol_type = other RNA
cttgaggaaagggctttggg

SEQ ID NO: 2974 - RNA, 20 nt, synthetic construct
  source 1..20: mol_type = other RNA
ccttgaggaaagggctttgg

SEQ ID NO: 2975 - RNA, 20 nt, synthetic construct
  source 1..20: mol_type = other RNA
accttgaggaaagggctttg

SEQ ID NO: 2976 - RNA, 20 nt, synthetic construct
  source 1..20: mol_type = other RNA
caccttgaggaaagggcttt

SEQ ID NO: 2977 - RNA, 20 nt, synthetic construct
  source 1..20: mol_type = other RNA
gcaccttgaggaaagggctt

SEQ ID NO: 2978 - RNA, 20 nt, synthetic construct
  source 1..20: mol_type = other RNA
agcaccttgaggaaagggct

SEQ ID NO: 2979 - RNA, 20 nt, synthetic construct
  source 1..20: mol_type = other RNA
gagcaccttgaggaaagggc

SEQ ID NO: 2980 - RNA, 20 nt, synthetic construct
  source 1..20: mol_type = other RNA
tgagcaccttgaggaaaggg

SEQ ID NO: 2981 - RNA, 20 nt, synthetic construct
  source 1..20: mol_type = other RNA
ctgagcaccttgaggaaagg

SEQ ID NO: 2982 - RNA, 20 nt, synthetic construct
  source 1..20: mol_type = other RNA
gctgagcaccttgaggaaag

SEQ ID NO: 2983 - RNA, 20 nt, synthetic construct
  source 1..20: mol_type = other RNA
tgctgagcaccttgaggaaa

SEQ ID NO: 2984 - RNA, 20 nt, synthetic construct
  source 1..20: mol_type = other RNA
ctgctgagcaccttgaggaa

SEQ ID NO: 2985 - RNA, 20 nt, synthetic construct
  source 1..20: mol_type = other RNA
cctgctgagcaccttgagga

SEQ ID NO: 2986 - RNA, 20 nt, synthetic construct
  source 1..20: mol_type = other RNA
tcctgctgagcaccttgagg

SEQ ID NO: 2987 - RNA, 20 nt, synthetic construct
  source 1..20: mol_type = other RNA
gtcctgctgagcaccttgag

SEQ ID NO: 2988 - RNA, 20 nt, synthetic construct
  source 1..20: mol_type = other RNA
tgtcctgctgagcaccttga

SEQ ID NO: 2989 - RNA, 20 nt, synthetic construct
  source 1..20: mol_type = other RNA
ctgtcctgctgagcaccttg

SEQ ID NO: 2990 - RNA, 20 nt, synthetic construct
  source 1..20: mol_type = other RNA
cctgtcctgctgagcacctt

SEQ ID NO: 2991 - RNA, 20 nt, synthetic construct
  source 1..20: mol_type = other RNA
ccctgtcctgctgagcacct

SEQ ID NO: 2992 - RNA, 20 nt, synthetic construct
  source 1..20: mol_type = other RNA
tccctgtcctgctgagcacc

SEQ ID NO: 2993 - RNA, 20 nt, synthetic construct
  source 1..20: mol_type = other RNA
ctccctgtcctgctgagcac

SEQ ID NO: 2994 - RNA, 20 nt, synthetic construct
  source 1..20: mol_type = other RNA
gctccctgtcctgctgagca

SEQ ID NO: 2995 - RNA, 20 nt, synthetic construct
  source 1..20: mol_type = other RNA
tgctccctgtcctgctgagc

SEQ ID NO: 2996 - RNA, 20 nt, synthetic construct
  source 1..20: mol_type = other RNA
ctgctccctgtcctgctgag

SEQ ID NO: 2997 - RNA, 20 nt, synthetic construct
  source 1..20: mol_type = other RNA
cctgctccctgtcctgctga

SEQ ID NO: 2998 - RNA, 20 nt, synthetic construct
  source 1..20: mol_type = other RNA
ccctgctccctgtcctgctg

SEQ ID NO: 2999 - RNA, 20 nt, synthetic construct
  source 1..20: mol_type = other RNA
tccctgctccctgtcctgct

SEQ ID NO: 3000 - RNA, 20 nt, synthetic construct
  source 1..20: mol_type = other RNA
atccctgctccctgtcctgc

SEQ ID NO: 3001 - RNA, 20 nt, synthetic construct
  source 1..20: mol_type = other RNA
aatccctgctccctgtcctg

SEQ ID NO: 3002 - RNA, 20 nt, synthetic construct
  source 1..20: mol_type = other RNA
caatccctgctccctgtcct

SEQ ID NO: 3003 - RNA, 20 nt, synthetic construct
  source 1..20: mol_type = other RNA
ccaatccctgctccctgtcc

SEQ ID NO: 3004 - RNA, 20 nt, synthetic construct
  source 1..20: mol_type = other RNA
accaatccctgctccctgtc

SEQ ID NO: 3005 - RNA, 20 nt, synthetic construct
  source 1..20: mol_type = other RNA
caccaatccctgctccctgt

SEQ ID NO: 3006 - RNA, 20 nt, synthetic construct
  source 1..20: mol_type = other RNA
ccaccaatccctgctccctg

SEQ ID NO: 3007 - RNA, 20 nt, synthetic construct
  source 1..20: mol_type = other RNA
cccaccaatccctgctccct

SEQ ID NO: 3008 - RNA, 20 nt, synthetic construct
  source 1..20: mol_type = other RNA
tcccaccaatccctgctccc

SEQ ID NO: 3009 - RNA, 20 nt, synthetic construct
  source 1..20: mol_type = other RNA
ctcccaccaatccctgctcc

SEQ ID NO: 3010 - RNA, 20 nt, synthetic construct
  source 1..20: mol_type = other RNA
tctcccaccaatccctgctc

SEQ ID NO: 3011 - RNA, 20 nt, synthetic construct
  source 1..20: mol_type = other RNA
gtctcccaccaatccctgct

SEQ ID NO: 3012 - RNA, 20 nt, synthetic construct
  source 1..20: mol_type = other RNA
tgtctcccaccaatccctgc

SEQ ID NO: 3013 - RNA, 20 nt, synthetic construct
  source 1..20: mol_type = other RNA
ctgtctcccaccaatccctg

SEQ ID NO: 3014 - RNA, 20 nt, synthetic construct
  source 1..20: mol_type = other RNA
actgtctcccaccaatccct

SEQ ID NO: 3015 - RNA, 20 nt, synthetic construct
  source 1..20: mol_type = other RNA
gactgtctcccaccaatccc

SEQ ID NO: 3016 - RNA, 20 nt, synthetic construct
  source 1..20: mol_type = other RNA
agactgtctcccaccaatcc

SEQ ID NO: 3017 - RNA, 20 nt, synthetic construct
  source 1..20: mol_type = other RNA
gagactgtctcccaccaatc

SEQ ID NO: 3018 - RNA, 20 nt, synthetic construct
  source 1..20: mol_type = other RNA
tgagactgtctcccaccaat

SEQ ID NO: 3019 - RNA, 20 nt, synthetic construct
  source 1..20: mol_type = other RNA
ctgagactgtctcccaccaa

SEQ ID NO: 3020 - RNA, 20 nt, synthetic construct
  source 1..20: mol_type = other RNA
cctgagactgtctcccacca

SEQ ID NO: 3021 - RNA, 20 nt, synthetic construct
  source 1..20: mol_type = other RNA
gcctgagactgtctcccacc

SEQ ID NO: 3022 - RNA, 20 nt, synthetic construct
  source 1..20: mol_type = other RNA
agcctgagactgtctcccac

SEQ ID NO: 3023 - RNA, 20 nt, synthetic construct
  source 1..20: mol_type = other RNA
cagcctgagactgtctccca

SEQ ID NO: 3024 - RNA, 20 nt, synthetic construct
  source 1..20: mol_type = other RNA
tcagcctgagactgtctccc

SEQ ID NO: 3025 - RNA, 20 nt, synthetic construct
  source 1..20: mol_type = other RNA
ttcagcctgagactgtctcc

SEQ ID NO: 3026 - RNA, 20 nt, synthetic construct
  source 1..20: mol_type = other RNA
attcagcctgagactgtctc

SEQ ID NO: 3027 - RNA, 20 nt, synthetic construct
  source 1..20: mol_type = other RNA
gattcagcctgagactgtct

SEQ ID NO: 3028 - RNA, 20 nt, synthetic construct
  source 1..20: mol_type = other RNA
agattcagcctgagactgtc

SEQ ID NO: 3029 - RNA, 20 nt, synthetic construct
  source 1..20: mol_type = other RNA
tagattcagcctgagactgt

SEQ ID NO: 3030 - RNA, 20 nt, synthetic construct
  source 1..20: mol_type = other RNA
ttagattcagcctgagactg

SEQ ID NO: 3031 - RNA, 20 nt, synthetic construct
  source 1..20: mol_type = other RNA
attagattcagcctgagact

SEQ ID NO: 3032 - RNA, 20 nt, synthetic construct
  source 1..20: mol_type = other RNA
aattagattcagcctgagac

SEQ ID NO: 3033 - RNA, 20 nt, synthetic construct
  source 1..20: mol_type = other RNA
aaattagattcagcctgaga

SEQ ID NO: 3034 - RNA, 20 nt, synthetic construct
  source 1..20: mol_type = other RNA
taaattagattcagcctgag

SEQ ID NO: 3035 - RNA, 20 nt, synthetic construct
  source 1..20: mol_type = other RNA
ttaaattagattcagcctga

SEQ ID NO: 3036 - RNA, 20 nt, synthetic construct
  source 1..20: mol_type = other RNA
cttaaattagattcagcctg

SEQ ID NO: 3037 - RNA, 20 nt, synthetic construct
  source 1..20: mol_type = other RNA
tcttaaattagattcagcct

SEQ ID NO: 3038 - RNA, 20 nt, synthetic construct
  source 1..20: mol_type = other RNA
atcttaaattagattcagcc

SEQ ID NO: 3039 - RNA, 20 nt, synthetic construct
  source 1..20: mol_type = other RNA
tatcttaaattagattcagc

SEQ ID NO: 3040 - RNA, 20 nt, synthetic construct
  source 1..20: mol_type = other RNA
gtatcttaaattagattcag

SEQ ID NO: 3041 - RNA, 20 nt, synthetic construct
  source 1..20: mol_type = other RNA
tgtatcttaaattagattca

SEQ ID NO: 3042 - RNA, 20 nt, synthetic construct
  source 1..20: mol_type = other RNA
ttgtatcttaaattagattc

SEQ ID NO: 3043 - RNA, 20 nt, synthetic construct
  source 1..20: mol_type = other RNA
cttgtatcttaaattagatt

SEQ ID NO: 3044 - RNA, 20 nt, synthetic construct
  source 1..20: mol_type = other RNA
ccttgtatcttaaattagat

SEQ ID NO: 3045 - RNA, 20 nt, synthetic construct
  source 1..20: mol_type = other RNA
accttgtatcttaaattaga

SEQ ID NO: 3046 - RNA, 20 nt, synthetic construct
  source 1..20: mol_type = other RNA
aaccttgtatcttaaattag

SEQ ID NO: 3047 - RNA, 20 nt, synthetic construct
  source 1..20: mol_type = other RNA
caaccttgtatcttaaatta

SEQ ID NO: 3048 - RNA, 20 nt, synthetic construct
  source 1..20: mol_type = other RNA
acaaccttgtatcttaaatt

SEQ ID NO: 3049 - RNA, 20 nt, synthetic construct
  source 1..20: mol_type = other RNA
cacaaccttgtatcttaaat

SEQ ID NO: 3050 - RNA, 20 nt, synthetic construct
  source 1..20: mol_type = other RNA
gcacaaccttgtatcttaaa

SEQ ID NO: 3051 - RNA, 20 nt, synthetic construct
  source 1..20: mol_type = other RNA
cgcacaaccttgtatcttaa

SEQ ID NO: 3052 - RNA, 20 nt, synthetic construct
  source 1..20: mol_type = other RNA
gcgcacaaccttgtatctta

SEQ ID NO: 3053 - RNA, 20 nt, synthetic construct
  source 1..20: mol_type = other RNA
ggcgcacaaccttgtatctt

SEQ ID NO: 3054 - RNA, 20 nt, synthetic construct
  source 1..20: mol_type = other RNA
tggcgcacaaccttgtatct

SEQ ID NO: 3055 - RNA, 20 nt, synthetic construct
  source 1..20: mol_type = other RNA
ctggcgcacaaccttgtatc

SEQ ID NO: 3056 - RNA, 20 nt, synthetic construct
  source 1..20: mol_type = other RNA
actggcgcacaaccttgtat

SEQ ID NO: 3057 - RNA, 20 nt, synthetic construct
  source 1..20: mol_type = other RNA
aactggcgcacaaccttgta

SEQ ID NO: 3058 - RNA, 20 nt, synthetic construct
  source 1..20: mol_type = other RNA
caactggcgcacaaccttgt

SEQ ID NO: 3059 - RNA, 20 nt, synthetic construct
  source 1..20: mol_type = other RNA
gcaactggcgcacaaccttg

SEQ ID NO: 3060 - RNA, 20 nt, synthetic construct
  source 1..20: mol_type = other RNA
ggcaactggcgcacaacctt

SEQ ID NO: 3061 - RNA, 20 nt, synthetic construct
  source 1..20: mol_type = other RNA
tggcaactggcgcacaacct

SEQ ID NO: 3062 - RNA, 20 nt, synthetic construct
  source 1..20: mol_type = other RNA
ctggcaactggcgcacaacc

SEQ ID NO: 3063 - RNA, 20 nt, synthetic construct
  source 1..20: mol_type = other RNA
cctggcaactggcgcacaac

SEQ ID NO: 3064 - RNA, 20 nt, synthetic construct
  source 1..20: mol_type = other RNA
acctggcaactggcgcacaa

SEQ ID NO: 3065 - RNA, 20 nt, synthetic construct
  source 1..20: mol_type = other RNA
cacctggcaactggcgcaca

SEQ ID NO: 3066 - RNA, 20 nt, synthetic construct
  source 1..20: mol_type = other RNA
acacctggcaactggcgcac

SEQ ID NO: 3067 - RNA, 20 nt, synthetic construct
  source 1..20: mol_type = other RNA
tacacctggcaactggcgca

SEQ ID NO: 3068 - RNA, 20 nt, synthetic construct
  source 1..20: mol_type = other RNA
ctacacctggcaactggcgc

SEQ ID NO: 3069 - RNA, 20 nt, synthetic construct
  source 1..20: mol_type = other RNA
cctacacctggcaactggcg

SEQ ID NO: 3070 - RNA, 20 nt, synthetic construct
  source 1..20: mol_type = other RNA
ccctacacctggcaactggc

SEQ ID NO: 3071 - RNA, 20 nt, synthetic construct
  source 1..20: mol_type = other RNA
tccctacacctggcaactgg

SEQ ID NO: 3072 - RNA, 20 nt, synthetic construct
  source 1..20: mol_type = other RNA
ctccctacacctggcaactg

SEQ ID NO: 3073 - RNA, 20 nt, synthetic construct
  source 1..20: mol_type = other RNA
tctccctacacctggcaact

SEQ ID NO: 3074 - RNA, 20 nt, synthetic construct
  source 1..20: mol_type = other RNA
ctctccctacacctggcaac

SEQ ID NO: 3075 - RNA, 20 nt, synthetic construct
  source 1..20: mol_type = other RNA
cctctccctacacctggcaa

SEQ ID NO: 3076 - RNA, 20 nt, synthetic construct
  source 1..20: mol_type = other RNA
tcctctccctacacctggca

SEQ ID NO: 3077 - RNA, 20 nt, synthetic construct
  source 1..20: mol_type = other RNA
ttcctctccctacacctggc

SEQ ID NO: 3078 - RNA, 20 nt, synthetic construct
  source 1..20: mol_type = other RNA
cttcctctccctacacctgg

SEQ ID NO: 3079 - RNA, 20 nt, synthetic construct
  source 1..20: mol_type = other RNA
acttcctctccctacacctg

SEQ ID NO: 3080 - RNA, 20 nt, synthetic construct
  source 1..20: mol_type = other RNA
tacttcctctccctacacct

SEQ ID NO: 3081 - RNA, 20 nt, synthetic construct
  source 1..20: mol_type = other RNA
ctacttcctctccctacacc

SEQ ID NO: 3082 - RNA, 20 nt, synthetic construct
  source 1..20: mol_type = other RNA
tctacttcctctccctacac

SEQ ID NO: 3083 - RNA, 20 nt, synthetic construct
  source 1..20: mol_type = other RNA
atctacttcctctccctaca

SEQ ID NO: 3084 - RNA, 20 nt, synthetic construct
  source 1..20: mol_type = other RNA
aatctacttcctctccctac

SEQ ID NO: 3085 - RNA, 20 nt, synthetic construct
  source 1..20: mol_type = other RNA
caatctacttcctctcccta

SEQ ID NO: 3086 - RNA, 20 nt, synthetic construct
  source 1..20: mol_type = other RNA
acaatctacttcctctccct

SEQ ID NO: 3087 - RNA, 20 nt, synthetic construct
  source 1..20: mol_type = other RNA
gacaatctacttcctctccc

SEQ ID NO: 3088 - RNA, 20 nt, synthetic construct
  source 1..20: mol_type = other RNA
agacaatctacttcctctcc

SEQ ID NO: 3089 - RNA, 20 nt, synthetic construct
  source 1..20: mol_type = other RNA
gagacaatctacttcctctc

SEQ ID NO: 3090 - RNA, 20 nt, synthetic construct
  source 1..20: mol_type = other RNA
ggagacaatctacttcctct

SEQ ID NO: 3091 - RNA, 20 nt, synthetic construct
  source 1..20: mol_type = other RNA
tggagacaatctacttcctc

SEQ ID NO: 3092 - RNA, 20 nt, synthetic construct
  source 1..20: mol_type = other RNA
ctggagacaatctacttcct

SEQ ID NO: 3093 - RNA, 20 nt, synthetic construct
  source 1..20: mol_type = other RNA
cctggagacaatctacttcc

SEQ ID NO: 3094 - RNA, 20 nt, synthetic construct
  source 1..20: mol_type = other RNA
acctggagacaatctacttc

SEQ ID NO: 3095 - RNA, 20 nt, synthetic construct
  source 1..20: mol_type = other RNA
cacctggagacaatctactt

SEQ ID NO: 3096 - RNA, 20 nt, synthetic construct
  source 1..20: mol_type = other RNA
ccacctggagacaatctact

SEQ ID NO: 3097 - RNA, 20 nt, synthetic construct
  source 1..20: mol_type = other RNA
cccacctggagacaatctac

SEQ ID NO: 3098 - RNA, 20 nt, synthetic construct
  source 1..20: mol_type = other RNA
ccccacctggagacaatcta

SEQ ID NO: 3099 - RNA, 20 nt, synthetic construct
  source 1..20: mol_type = other RNA
tccccacctggagacaatct

SEQ ID NO: 3100 - RNA, 20 nt, synthetic construct
  source 1..20: mol_type = other RNA
ttccccacctggagacaatc

SEQ ID NO: 3101 - RNA, 20 nt, synthetic construct
  source 1..20: mol_type = other RNA
cttccccacctggagacaat

SEQ ID NO: 3102 - RNA, 20 nt, synthetic construct
  source 1..20: mol_type = other RNA
tcttccccacctggagacaa

SEQ ID NO: 3103 - RNA, 20 nt, synthetic construct
  source 1..20: mol_type = other RNA
ttcttccccacctggagaca

SEQ ID NO: 3104 - RNA, 20 nt, synthetic construct
  source 1..20: mol_type = other RNA
cttcttccccacctggagac

SEQ ID NO: 3105 - RNA, 20 nt, synthetic construct
  source 1..20: mol_type = other RNA
tcttcttccccacctggaga

SEQ ID NO: 3106 - RNA, 20 nt, synthetic construct
  source 1..20: mol_type = other RNA
ctcttcttccccacctggag

SEQ ID NO: 3107 - RNA, 20 nt, synthetic construct
  source 1..20: mol_type = other RNA
tctcttcttccccacctgga

SEQ ID NO: 3108 - RNA, 20 nt, synthetic construct
  source 1..20: mol_type = other RNA
atctcttcttccccacctgg

SEQ ID NO: 3109 - RNA, 20 nt, synthetic construct
  source 1..20: mol_type = other RNA
aatctcttcttccccacctg

SEQ ID NO: 3110 - RNA, 20 nt, synthetic construct
  source 1..20: mol_type = other RNA
aaatctcttcttccccacct

SEQ ID NO: 3111 - RNA, 20 nt, synthetic construct
  source 1..20: mol_type = other RNA
gaaatctcttcttccccacc

SEQ ID NO: 3112 - RNA, 20 nt, synthetic construct
  source 1..20: mol_type = other RNA
tgaaatctcttcttccccac

SEQ ID NO: 3113 - RNA, 20 nt, synthetic construct
  source 1..20: mol_type = other RNA
atgaaatctcttcttcccca

SEQ ID NO: 3114 - RNA, 20 nt, synthetic construct
  source 1..20: mol_type = other RNA
aatgaaatctcttcttcccc

SEQ ID NO: 3115 - RNA, 20 nt, synthetic construct
  source 1..20: mol_type = other RNA
gaatgaaatctcttcttccc

SEQ ID NO: 3116 - RNA, 20 nt, synthetic construct
  source 1..20: mol_type = other RNA
ggaatgaaatctcttcttcc

SEQ ID NO: 3117 - RNA, 20 nt, synthetic construct
  source 1..20: mol_type = other RNA
tggaatgaaatctcttcttc

SEQ ID NO: 3118 - RNA, 20 nt, synthetic construct
  source 1..20: mol_type = other RNA
gtggaatgaaatctcttctt

SEQ ID NO: 3119 - RNA, 20 nt, synthetic construct
  source 1..20: mol_type = other RNA
ggtggaatgaaatctcttct

SEQ ID NO: 3120 - RNA, 20 nt, synthetic construct
  source 1..20: mol_type = other RNA
aggtggaatgaaatctcttc

SEQ ID NO: 3121 - RNA, 20 nt, synthetic construct
  source 1..20: mol_type = other RNA
aaggtggaatgaaatctctt

SEQ ID NO: 3122 - RNA, 20 nt, synthetic construct
  source 1..20: mol_type = other RNA
taaggtggaatgaaatctct

SEQ ID NO: 3123 - RNA, 20 nt, synthetic construct
  source 1..20: mol_type = other RNA
ctaaggtggaatgaaatctc

SEQ ID NO: 3124 - RNA, 20 nt, synthetic construct
  source 1..20: mol_type = other RNA
cctaaggtggaatgaaatct

SEQ ID NO: 3125 - RNA, 20 nt, synthetic construct
  source 1..20: mol_type = other RNA
tcctaaggtggaatgaaatc

SEQ ID NO: 3126 - RNA, 20 nt, synthetic construct
  source 1..20: mol_type = other RNA
ctcctaaggtggaatgaaat

SEQ ID NO: 3127 - RNA, 20 nt, synthetic construct
  source 1..20: mol_type = other RNA
gctcctaaggtggaatgaaa

SEQ ID NO: 3128 - RNA, 20 nt, synthetic construct
  source 1..20: mol_type = other RNA
tgctcctaaggtggaatgaa

SEQ ID NO: 3129 - RNA, 20 nt, synthetic construct
  source 1..20: mol_type = other RNA
atgctcctaaggtggaatga

SEQ ID NO: 3130 - RNA, 20 nt, synthetic construct
  source 1..20: mol_type = other RNA
gatgctcctaaggtggaatg

SEQ ID NO: 3131 - RNA, 20 nt, synthetic construct
  source 1..20: mol_type = other RNA
agatgctcctaaggtggaat

SEQ ID NO: 3132 - RNA, 20 nt, synthetic construct
  source 1..20: mol_type = other RNA
gagatgctcctaaggtggaa

SEQ ID NO: 3133 - RNA, 20 nt, synthetic construct
  source 1..20: mol_type = other RNA
ggagatgctcctaaggtgga

SEQ ID NO: 3134 - RNA, 20 nt, synthetic construct
  source 1..20: mol_type = other RNA
aggagatgctcctaaggtgg

SEQ ID NO: 3135 - RNA, 20 nt, synthetic construct
  source 1..20: mol_type = other RNA
aaggagatgctcctaaggtg

SEQ ID NO: 3136 - RNA, 20 nt, synthetic construct
  source 1..20: mol_type = other RNA
caaggagatgctcctaaggt

SEQ ID NO: 3137 - RNA, 20 nt, synthetic construct
  source 1..20: mol_type = other RNA
tcaaggagatgctcctaagg

SEQ ID NO: 3138 - RNA, 20 nt, synthetic construct
  source 1..20: mol_type = other RNA
ctcaaggagatgctcctaag

SEQ ID NO: 3139 - RNA, 20 nt, synthetic construct
  source 1..20: mol_type = other RNA
gctcaaggagatgctcctaa

SEQ ID NO: 3140 - RNA, 20 nt, synthetic construct
  source 1..20: mol_type = other RNA
agctcaaggagatgctccta

SEQ ID NO: 3141 - RNA, 20 nt, synthetic construct
  source 1..20: mol_type = other RNA
cagctcaaggagatgctcct

SEQ ID NO: 3142 - RNA, 20 nt, synthetic construct
  source 1..20: mol_type = other RNA
tcagctcaaggagatgctcc

SEQ ID NO: 3143 - RNA, 20 nt, synthetic construct
  source 1..20: mol_type = other RNA
ctcagctcaaggagatgctc

SEQ ID NO: 3144 - RNA, 20 nt, synthetic construct
  source 1..20: mol_type = other RNA
actcagctcaaggagatgct

SEQ ID NO: 3145 - RNA, 20 nt, synthetic construct
  source 1..20: mol_type = other RNA
gactcagctcaaggagatgc

SEQ ID NO: 3146 - RNA, 20 nt, synthetic construct
  source 1..20: mol_type = other RNA
agactcagctcaaggagatg

SEQ ID NO: 3147 - RNA, 20 nt, synthetic construct
  source 1..20: mol_type = other RNA
cagactcagctcaaggagat

SEQ ID NO: 3148 - RNA, 20 nt, synthetic construct
  source 1..20: mol_type = other RNA
ccagactcagctcaaggaga

SEQ ID NO: 3149 - RNA, 20 nt, synthetic construct
  source 1..20: mol_type = other RNA
cccagactcagctcaaggag

SEQ ID NO: 3150 - RNA, 20 nt, synthetic construct
  source 1..20: mol_type = other RNA
tcccagactcagctcaagga

SEQ ID NO: 3151 - RNA, 20 nt, synthetic construct
  source 1..20: mol_type = other RNA
ttcccagactcagctcaagg

SEQ ID NO: 3152 - RNA, 20 nt, synthetic construct
  source 1..20: mol_type = other RNA
cttcccagactcagctcaag

SEQ ID NO: 3153 - RNA, 20 nt, synthetic construct
  source 1..20: mol_type = other RNA
tcttcccagactcagctcaa

SEQ ID NO: 3154 - RNA, 20 nt, synthetic construct
  source 1..20: mol_type = other RNA
atcttcccagactcagctca

SEQ ID NO: 3155 - RNA, 20 nt, synthetic construct
  source 1..20: mol_type = other RNA
aatcttcccagactcagctc

SEQ ID NO: 3156 - RNA, 20 nt, synthetic construct
  source 1..20: mol_type = other RNA
aaatcttcccagactcagct

SEQ ID NO: 3157 - RNA, 20 nt, synthetic construct
  source 1..20: mol_type = other RNA
aaaatcttcccagactcagc

SEQ ID NO: 3158 - RNA, 20 nt, synthetic construct
  source 1..20: mol_type = other RNA
taaaatcttcccagactcag

SEQ ID NO: 3159 - RNA, 20 nt, synthetic construct
  source 1..20: mol_type = other RNA
ttaaaatcttcccagactca

SEQ ID NO: 3160 - RNA, 20 nt, synthetic construct
  source 1..20: mol_type = other RNA
gttaaaatcttcccagactc

SEQ ID NO: 3161 - RNA, 20 nt, synthetic construct
  source 1..20: mol_type = other RNA
agttaaaatcttcccagact

SEQ ID NO: 3162 - RNA, 20 nt, synthetic construct
  source 1..20: mol_type = other RNA
cagttaaaatcttcccagac

SEQ ID NO: 3163 - RNA, 20 nt, synthetic construct
  source 1..20: mol_type = other RNA
ccagttaaaatcttcccaga

SEQ ID NO: 3164 - RNA, 20 nt, synthetic construct
  source 1..20: mol_type = other RNA
gccagttaaaatcttcccag

SEQ ID NO: 3165 - RNA, 20 nt, synthetic construct
  source 1..20: mol_type = other RNA
tgccagttaaaatcttccca

SEQ ID NO: 3166 - RNA, 20 nt, synthetic construct
  source 1..20: mol_type = other RNA
ctgccagttaaaatcttccc

SEQ ID NO: 3167 - RNA, 20 nt, synthetic construct
  source 1..20: mol_type = other RNA
cctgccagttaaaatcttcc

SEQ ID NO: 3168 - RNA, 20 nt, synthetic construct
  source 1..20: mol_type = other RNA
acctgccagttaaaatcttc

SEQ ID NO: 3169 - RNA, 20 nt, synthetic construct
  source 1..20: mol_type = other RNA
cacctgccagttaaaatctt

SEQ ID NO: 3170 - RNA, 20 nt, synthetic construct
  source 1..20: mol_type = other RNA
ccacctgccagttaaaatct

SEQ ID NO: 3171 - RNA, 20 nt, synthetic construct
  source 1..20: mol_type = other RNA
tccacctgccagttaaaatc

SEQ ID NO: 3172 - RNA, 20 nt, synthetic construct
  source 1..20: mol_type = other RNA
ctccacctgccagttaaaat

SEQ ID NO: 3173 - RNA, 20 nt, synthetic construct
  source 1..20: mol_type = other RNA
cctccacctgccagttaaaa

SEQ ID NO: 3174 - RNA, 20 nt, synthetic construct
  source 1..20: mol_type = other RNA
tcctccacctgccagttaaa

SEQ ID NO: 3175 - RNA, 20 nt, synthetic construct
  source 1..20: mol_type = other RNA
ctcctccacctgccagttaa

SEQ ID NO: 3176 - RNA, 20 nt, synthetic construct
  source 1..20: mol_type = other RNA
cctcctccacctgccagtta

SEQ ID NO: 3177 - RNA, 20 nt, synthetic construct
  source 1..20: mol_type = other RNA
tcctcctccacctgccagtt

SEQ ID NO: 3178 - RNA, 20 nt, synthetic construct
  source 1..20: mol_type = other RNA
ctcctcctccacctgccagt

SEQ ID NO: 3179 - RNA, 20 nt, synthetic construct
  source 1..20: mol_type = other RNA
cctcctcctccacctgccag

SEQ ID NO: 3180 - RNA, 20 nt, synthetic construct
  source 1..20: mol_type = other RNA
acctcctcctccacctgcca

SEQ ID NO: 3181 - RNA, 20 nt, synthetic construct
  source 1..20: mol_type = other RNA
cacctcctcctccacctgcc

SEQ ID NO: 3182 - RNA, 20 nt, synthetic construct
  source 1..20: mol_type = other RNA
acacctcctcctccacctgc

SEQ ID NO: 3183 - RNA, 20 nt, synthetic construct
  source 1..20: mol_type = other RNA
aacacctcctcctccacctg

SEQ ID NO: 3184 - RNA, 20 nt, synthetic construct
  source 1..20: mol_type = other RNA
caacacctcctcctccacct

SEQ ID NO: 3185 - RNA, 20 nt, synthetic construct
  source 1..20: mol_type = other RNA
ccaacacctcctcctccacc

SEQ ID NO: 3186 - RNA, 20 nt, synthetic construct
  source 1..20: mol_type = other RNA
cccaacacctcctcctccac

SEQ ID NO: 3187 - RNA, 20 nt, synthetic construct
  source 1..20: mol_type = other RNA
tcccaacacctcctcctcca

SEQ ID NO: 3188 - RNA, 20 nt, synthetic construct
  source 1..20: mol_type = other RNA
ttcccaacacctcctcctcc

SEQ ID NO: 3189 - RNA, 20 nt, synthetic construct
  source 1..20: mol_type = other RNA
cttcccaacacctcctcctc

SEQ ID NO: 3190 - RNA, 20 nt, synthetic construct
  source 1..20: mol_type = other RNA
tcttcccaacacctcctcct

SEQ ID NO: 3191 - RNA, 20 nt, synthetic construct
  source 1..20: mol_type = other RNA
ctcttcccaacacctcctcc

SEQ ID NO: 3192 - RNA, 20 nt, synthetic construct
  source 1..20: mol_type = other RNA
gctcttcccaacacctcctc

SEQ ID NO: 3193 - RNA, 20 nt, synthetic construct
  source 1..20: mol_type = other RNA
ggctcttcccaacacctcct

SEQ ID NO: 3194 - RNA, 20 nt, synthetic construct
  source 1..20: mol_type = other RNA
gggctcttcccaacacctcc

SEQ ID NO: 3195 - RNA, 20 nt, synthetic construct
  source 1..20: mol_type = other RNA
agggctcttcccaacacctc

SEQ ID NO: 3196 - RNA, 20 nt, synthetic construct
  source 1..20: mol_type = other RNA
cagggctcttcccaacacct

SEQ ID NO: 3197 - RNA, 20 nt, synthetic construct
  source 1..20: mol_type = other RNA
ccagggctcttcccaacacc

SEQ ID NO: 3198 - RNA, 20 nt, synthetic construct
  source 1..20: mol_type = other RNA
cccagggctcttcccaacac

SEQ ID NO: 3199 - RNA, 20 nt, synthetic construct
  source 1..20: mol_type = other RNA
tcccagggctcttcccaaca

SEQ ID NO: 3200 - RNA, 20 nt, synthetic construct
  source 1..20: mol_type = other RNA
ttcccagggctcttcccaac

SEQ ID NO: 3201 - RNA, 20 nt, synthetic construct
  source 1..20: mol_type = other RNA
tttcccagggctcttcccaa

SEQ ID NO: 3202 - RNA, 20 nt, synthetic construct
  source 1..20: mol_type = other RNA
gtttcccagggctcttccca

SEQ ID NO: 3203 - RNA, 20 nt, synthetic construct
  source 1..20: mol_type = other RNA
ggtttcccagggctcttccc

SEQ ID NO: 3204 - RNA, 20 nt, synthetic construct
  source 1..20: mol_type = other RNA
tggtttcccagggctcttcc

SEQ ID NO: 3205 - RNA, 20 nt, synthetic construct
  source 1..20: mol_type = other RNA
ctggtttcccagggctcttc

SEQ ID NO: 3206 - RNA, 20 nt, synthetic construct
  source 1..20: mol_type = other RNA
tctggtttcccagggctctt

SEQ ID NO: 3207 - RNA, 20 nt, synthetic construct
  source 1..20: mol_type = other RNA
atctggtttcccagggctct

SEQ ID NO: 3208 - RNA, 20 nt, synthetic construct
  source 1..20: mol_type = other RNA
catctggtttcccagggctc

SEQ ID NO: 3209 - RNA, 20 nt, synthetic construct
  source 1..20: mol_type = other RNA
ccatctggtttcccagggct

SEQ ID NO: 3210 - RNA, 20 nt, synthetic construct
  source 1..20: mol_type = other RNA
cccatctggtttcccagggc

SEQ ID NO: 3211 - RNA, 20 nt, synthetic construct
  source 1..20: mol_type = other RNA
tcccatctggtttcccaggg

SEQ ID NO: 3212 - RNA, 20 nt, synthetic construct
  source 1..20: mol_type = other RNA
ttcccatctggtttcccagg

SEQ ID NO: 3213 - RNA, 20 nt, synthetic construct
  source 1..20: mol_type = other RNA
cttcccatctggtttcccag

SEQ ID NO: 3214 - RNA, 20 nt, synthetic construct
  source 1..20: mol_type = other RNA
ccttcccatctggtttccca

SEQ ID NO: 3215 - RNA, 20 nt, synthetic construct
  source 1..20: mol_type = other RNA
cccttcccatctggtttccc

SEQ ID NO: 3216 - RNA, 20 nt, synthetic construct
  source 1..20: mol_type = other RNA
gcccttcccatctggtttcc

SEQ ID NO: 3217 - RNA, 20 nt, synthetic construct
  source 1..20: mol_type = other RNA
tgcccttcccatctggtttc

SEQ ID NO: 3218 - RNA, 20 nt, synthetic construct
  source 1..20: mol_type = other RNA
ctgcccttcccatctggttt

SEQ ID NO: 3219 - RNA, 20 nt, synthetic construct
  source 1..20: mol_type = other RNA
cctgcccttcccatctggtt

SEQ ID NO: 3220 - RNA, 20 nt, synthetic construct
  source 1..20: mol_type = other RNA
gcctgcccttcccatctggt

SEQ ID NO: 3221 - RNA, 20 nt, synthetic construct
  source 1..20: mol_type = other RNA
agcctgcccttcccatctgg

SEQ ID NO: 3222 - RNA, 20 nt, synthetic construct
  source 1..20: mol_type = other RNA
aagcctgcccttcccatctg

SEQ ID NO: 3223 - RNA, 20 nt, synthetic construct
  source 1..20: mol_type = other RNA
caagcctgcccttcccatct

SEQ ID NO: 3224 - RNA, 20 nt, synthetic construct
  source 1..20: mol_type = other RNA
ccaagcctgcccttcccatc

SEQ ID NO: 3225 - RNA, 20 nt, synthetic construct
  source 1..20: mol_type = other RNA
gccaagcctgcccttcccat

SEQ ID NO: 3226 - RNA, 20 nt, synthetic construct
  source 1..20: mol_type = other RNA
tgccaagcctgcccttccca

SEQ ID NO: 3227 - RNA, 20 nt, synthetic construct
  source 1..20: mol_type = other RNA
ctgccaagcctgcccttccc

SEQ ID NO: 3228 - RNA, 20 nt, synthetic construct
  source 1..20: mol_type = other RNA
cctgccaagcctgcccttcc

SEQ ID NO: 3229 - RNA, 20 nt, synthetic construct
  source 1..20: mol_type = other RNA
ccctgccaagcctgcccttc

SEQ ID NO: 3230 - RNA, 20 nt, synthetic construct
  source 1..20: mol_type = other RNA
tccctgccaagcctgccctt

SEQ ID NO: 3231 - RNA, 20 nt, synthetic construct
  source 1..20: mol_type = other RNA
atccctgccaagcctgccct

SEQ ID NO: 3232 - RNA, 20 nt, synthetic construct
  source 1..20: mol_type = other RNA
aatccctgccaagcctgccc

SEQ ID NO: 3233 - RNA, 20 nt, synthetic construct
  source 1..20: mol_type = other RNA
caatccctgccaagcctgcc

SEQ ID NO: 3234 - RNA, 20 nt, synthetic construct
  source 1..20: mol_type = other RNA
tcaatccctgccaagcctgc

SEQ ID NO: 3235 - RNA, 20 nt, synthetic construct
  source 1..20: mol_type = other RNA
ttcaatccctgccaagcctg

SEQ ID NO: 3236 - RNA, 20 nt, synthetic construct
  source 1..20: mol_type = other RNA
attcaatccctgccaagcct

SEQ ID NO: 3237 - RNA, 20 nt, synthetic construct
  source 1..20: mol_type = other RNA
cattcaatccctgccaagcc

SEQ ID NO: 3238 - RNA, 20 nt, synthetic construct
  source 1..20: mol_type = other RNA
gcattcaatccctgccaagc

SEQ ID NO: 3239 - RNA, 20 nt, synthetic construct
  source 1..20: mol_type = other RNA
ggcattcaatccctgccaag

SEQ ID NO: 3240 - RNA, 20 nt, synthetic construct
  source 1..20: mol_type = other RNA
tggcattcaatccctgccaa

SEQ ID NO: 3241 - RNA, 20 nt, synthetic construct
  source 1..20: mol_type = other RNA
atggcattcaatccctgcca

SEQ ID NO: 3242 - RNA, 20 nt, synthetic construct
  source 1..20: mol_type = other RNA
catggcattcaatccctgcc

SEQ ID NO: 3243 - RNA, 20 nt, synthetic construct
  source 1..20: mol_type = other RNA
acatggcattcaatccctgc

SEQ ID NO: 3244 - RNA, 20 nt, synthetic construct
  source 1..20: mol_type = other RNA
aacatggcattcaatccctg

SEQ ID NO: 3245 - RNA, 20 nt, synthetic construct
  source 1..20: mol_type = other RNA
gaacatggcattcaatccct

SEQ ID NO: 3246 - RNA, 20 nt, synthetic construct
  source 1..20: mol_type = other RNA
tgaacatggcattcaatccc

SEQ ID NO: 3247 - RNA, 20 nt, synthetic construct
  source 1..20: mol_type = other RNA
ttgaacatggcattcaatcc

SEQ ID NO: 3248 - RNA, 20 nt, synthetic construct
  source 1..20: mol_type = other RNA
attgaacatggcattcaatc

SEQ ID NO: 3249 - RNA, 20 nt, synthetic construct
  source 1..20: mol_type = other RNA
cattgaacatggcattcaat

SEQ ID NO: 3250 - RNA, 20 nt, synthetic construct
  source 1..20: mol_type = other RNA
gcattgaacatggcattcaa

SEQ ID NO: 3251 - RNA, 20 nt, synthetic construct
  source 1..20: mol_type = other RNA
ggcattgaacatggcattca

SEQ ID NO: 3252 - RNA, 20 nt, synthetic construct
  source 1..20: mol_type = other RNA
tggcattgaacatggcattc

SEQ ID NO: 3253 - RNA, 20 nt, synthetic construct
  source 1..20: mol_type = other RNA
ctggcattgaacatggcatt

SEQ ID NO: 3254 - RNA, 20 nt, synthetic construct
  source 1..20: mol_type = other RNA
actggcattgaacatggcat

SEQ ID NO: 3255 - RNA, 20 nt, synthetic construct
  source 1..20: mol_type = other RNA
cactggcattgaacatggca

SEQ ID NO: 3256 - RNA, 20 nt, synthetic construct
  source 1..20: mol_type = other RNA
ccactggcattgaacatggc

SEQ ID NO: 3257 - RNA, 20 nt, synthetic construct
  source 1..20: mol_type = other RNA
cccactggcattgaacatgg

SEQ ID NO: 3258 - RNA, 20 nt, synthetic construct
  source 1..20: mol_type = other RNA
gcccactggcattgaacatg

SEQ ID NO: 3259 - RNA, 20 nt, synthetic construct
  source 1..20: mol_type = other RNA
agcccactggcattgaacat

SEQ ID NO: 3260 - RNA, 20 nt, synthetic construct
  source 1..20: mol_type = other RNA
aagcccactggcattgaaca

SEQ ID NO: 3261 - RNA, 20 nt, synthetic construct
  source 1..20: mol_type = other RNA
gaagcccactggcattgaac

SEQ ID NO: 3262 - RNA, 20 nt, synthetic construct
  source 1..20: mol_type = other RNA
tgaagcccactggcattgaa

SEQ ID NO: 3263 - RNA, 20 nt, synthetic construct
  source 1..20: mol_type = other RNA
ctgaagcccactggcattga

SEQ ID NO: 3264 - RNA, 20 nt, synthetic construct
  source 1..20: mol_type = other RNA
cctgaagcccactggcattg

SEQ ID NO: 3265 - RNA, 20 nt, synthetic construct
  source 1..20: mol_type = other RNA
tcctgaagcccactggcatt

SEQ ID NO: 3266 - RNA, 20 nt, synthetic construct
  source 1..20: mol_type = other RNA
ctcctgaagcccactggcat

SEQ ID NO: 3267 - RNA, 20 nt, synthetic construct
  source 1..20: mol_type = other RNA
gctcctgaagcccactggca

SEQ ID NO: 3268 - RNA, 20 nt, synthetic construct
  source 1..20: mol_type = other RNA
agctcctgaagcccactggc

SEQ ID NO: 3269 - RNA, 20 nt, synthetic construct
  source 1..20: mol_type = other RNA
cagctcctgaagcccactgg

SEQ ID NO: 3270 - RNA, 20 nt, synthetic construct
  source 1..20: mol_type = other RNA
gcagctcctgaagcccactg

SEQ ID NO: 3271 - RNA, 20 nt, synthetic construct
  source 1..20: mol_type = other RNA
agcagctcctgaagcccact

SEQ ID NO: 3272 - RNA, 20 nt, synthetic construct
  source 1..20: mol_type = other RNA
cagcagctcctgaagcccac

SEQ ID NO: 3273 - RNA, 20 nt, synthetic construct
  source 1..20: mol_type = other RNA
ccagcagctcctgaagccca

SEQ ID NO: 3274 - RNA, 20 nt, synthetic construct
  source 1..20: mol_type = other RNA
cccagcagctcctgaagccc

SEQ ID NO: 3275 - RNA, 20 nt, synthetic construct
  source 1..20: mol_type = other RNA
acccagcagctcctgaagcc

SEQ ID NO: 3276 - RNA, 20 nt, synthetic construct
  source 1..20: mol_type = other RNA
cacccagcagctcctgaagc

SEQ ID NO: 3277 - RNA, 20 nt, synthetic construct
  source 1..20: mol_type = other RNA
gcacccagcagctcctgaag

SEQ ID NO: 3278 - RNA, 20 nt, synthetic construct
  source 1..20: mol_type = other RNA
ggcacccagcagctcctgaa

SEQ ID NO: 3279 - RNA, 20 nt, synthetic construct
  source 1..20: mol_type = other RNA
aggcacccagcagctcctga

SEQ ID NO: 3280 - RNA, 20 nt, synthetic construct
  source 1..20: mol_type = other RNA
caggcacccagcagctcctg

SEQ ID NO: 3281 - RNA, 20 nt, synthetic construct
  source 1..20: mol_type = other RNA
ccaggcacccagcagctcct

SEQ ID NO: 3282 - RNA, 20 nt, synthetic construct
  source 1..20: mol_type = other RNA
gccaggcacccagcagctcc

SEQ ID NO: 3283 - RNA, 20 nt, synthetic construct
  source 1..20: mol_type = other RNA
tgccaggcacccagcagctc

SEQ ID NO: 3284 - RNA, 20 nt, synthetic construct
  source 1..20: mol_type = other RNA
gtgccaggcacccagcagct

SEQ ID NO: 3285 - RNA, 20 nt, synthetic construct
  source 1..20: mol_type = other RNA
cgtgccaggcacccagcagc

SEQ ID NO: 3286 - RNA, 20 nt, synthetic construct
  source 1..20: mol_type = other RNA
ccgtgccaggcacccagcag

SEQ ID NO: 3287 - RNA, 20 nt, synthetic construct
  source 1..20: mol_type = other RNA
cccgtgccaggcacccagca

SEQ ID NO: 3288 - RNA, 20 nt, synthetic construct
  source 1..20: mol_type = other RNA
gcccgtgccaggcacccagc

SEQ ID NO: 3289 - RNA, 20 nt, synthetic construct
  source 1..20: mol_type = other RNA
agcccgtgccaggcacccag

SEQ ID NO: 3290 - RNA, 20 nt, synthetic construct
  source 1..20: mol_type = other RNA
cagcccgtgccaggcaccca

SEQ ID NO: 3291 - RNA, 20 nt, synthetic construct
  source 1..20: mol_type = other RNA
ccagcccgtgccaggcaccc

SEQ ID NO: 3292 - RNA, 20 nt, synthetic construct
  source 1..20: mol_type = other RNA
cccagcccgtgccaggcacc

SEQ ID NO: 3293 - RNA, 20 nt, synthetic construct
  source 1..20: mol_type = other RNA
gcccagcccgtgccaggcac

SEQ ID NO: 3294 - RNA, 20 nt, synthetic construct
  source 1..20: mol_type = other RNA
agcccagcccgtgccaggca

SEQ ID NO: 3295 - RNA, 20 nt, synthetic construct
  source 1..20: mol_type = other RNA
cagcccagcccgtgccaggc

SEQ ID NO: 3296 - RNA, 20 nt, synthetic construct
  source 1..20: mol_type = other RNA
acagcccagcccgtgccagg

SEQ ID NO: 3297 - RNA, 20 nt, synthetic construct
  source 1..20: mol_type = other RNA
cacagcccagcccgtgccag

SEQ ID NO: 3298 - RNA, 20 nt, synthetic construct
  source 1..20: mol_type = other RNA
ccacagcccagcccgtgcca

SEQ ID NO: 3299 - RNA, 20 nt, synthetic construct
  source 1..20: mol_type = other RNA
accacagcccagcccgtgcc

SEQ ID NO: 3300 - RNA, 20 nt, synthetic construct
  source 1..20: mol_type = other RNA
caccacagcccagcccgtgc

SEQ ID NO: 3301 - RNA, 20 nt, synthetic construct
  source 1..20: mol_type = other RNA
ccaccacagcccagcccgtg

SEQ ID NO: 3302 - RNA, 20 nt, synthetic construct
  source 1..20: mol_type = other RNA
cccaccacagcccagcccgt

SEQ ID NO: 3303 - RNA, 20 nt, synthetic construct
  source 1..20: mol_type = other RNA
ccccaccacagcccagcccg

SEQ ID NO: 3304 - RNA, 20 nt, synthetic construct
  source 1..20: mol_type = other RNA
cccccaccacagcccagccc

SEQ ID NO: 3305 - RNA, 20 nt, synthetic construct
  source 1..20: mol_type = other RNA
gcccccaccacagcccagcc

SEQ ID NO: 3306 - RNA, 20 nt, synthetic construct
  source 1..20: mol_type = other RNA
agcccccaccacagcccagc

SEQ ID NO: 3307 - RNA, 20 nt, synthetic construct
  source 1..20: mol_type = other RNA
cagcccccaccacagcccag

SEQ ID NO: 3308 - RNA, 20 nt, synthetic construct
  source 1..20: mol_type = other RNA
acagcccccaccacagccca

SEQ ID NO: 3309 - RNA, 20 nt, synthetic construct
  source 1..20: mol_type = other RNA
gacagcccccaccacagccc

SEQ ID NO: 3310 - RNA, 20 nt, synthetic construct
  source 1..20: mol_type = other RNA
cgacagcccccaccacagcc

SEQ ID NO: 3311 - RNA, 20 nt, synthetic construct
  source 1..20: mol_type = other RNA
tcgacagcccccaccacagc

SEQ ID NO: 3312 - RNA, 20 nt, synthetic construct
  source 1..20: mol_type = other RNA
ttcgacagcccccaccacag

SEQ ID NO: 3313 - RNA, 20 nt, synthetic construct
  source 1..20: mol_type = other RNA
tttcgacagcccccaccaca

SEQ ID NO: 3314 - RNA, 20 nt, synthetic construct
  source 1..20: mol_type = other RNA
ctttcgacagcccccaccac

SEQ ID NO: 3315 - RNA, 20 nt, synthetic construct
  source 1..20: mol_type = other RNA
tctttcgacagcccccacca

SEQ ID NO: 3316 - RNA, 20 nt, synthetic construct
  source 1..20: mol_type = other RNA
ctctttcgacagcccccacc

SEQ ID NO: 3317 - RNA, 20 nt, synthetic construct
  source 1..20: mol_type = other RNA
tctctttcgacagcccccac

SEQ ID NO: 3318 - RNA, 20 nt, synthetic construct
  source 1..20: mol_type = other RNA
ttctctttcgacagccccca

SEQ ID NO: 3319 - RNA, 20 nt, synthetic construct
  source 1..20: mol_type = other RNA
cttctctttcgacagccccc

SEQ ID NO: 3320 - RNA, 20 nt, synthetic construct
  source 1..20: mol_type = other RNA
acttctctttcgacagcccc

SEQ ID NO: 3321 - RNA, 20 nt, synthetic construct
  source 1..20: mol_type = other RNA
cacttctctttcgacagccc

SEQ ID NO: 3322 - RNA, 20 nt, synthetic construct
  source 1..20: mol_type = other RNA
ccacttctctttcgacagcc

SEQ ID NO: 3323 - RNA, 20 nt, synthetic construct
  source 1..20: mol_type = other RNA
gccacttctctttcgacagc

SEQ ID NO: 3324 - RNA, 20 nt, synthetic construct
  source 1..20: mol_type = other RNA
agccacttctctttcgacag

SEQ ID NO: 3325 - RNA, 20 nt, synthetic construct
  source 1..20: mol_type = other RNA
aagccacttctctttcgaca

SEQ ID NO: 3326 - RNA, 20 nt, synthetic construct
  source 1..20: mol_type = other RNA
gaagccacttctctttcgac

SEQ ID NO: 3327 - RNA, 20 nt, synthetic construct
  source 1..20: mol_type = other RNA
ggaagccacttctctttcga

SEQ ID NO: 3328 - RNA, 20 nt, synthetic construct
  source 1..20: mol_type = other RNA
aggaagccacttctctttcg

SEQ ID NO: 3329 - RNA, 20 nt, synthetic construct
  source 1..20: mol_type = other RNA
taggaagccacttctctttc

SEQ ID NO: 3330 - RNA, 20 nt, synthetic construct
  source 1..20: mol_type = other RNA
ctaggaagccacttctcttt

SEQ ID NO: 3331 - RNA, 20 nt, synthetic construct
  source 1..20: mol_type = other RNA
actaggaagccacttctctt

SEQ ID NO: 3332 - RNA, 20 nt, synthetic construct
  source 1..20: mol_type = other RNA
gactaggaagccacttctct

SEQ ID NO: 3333 - RNA, 20 nt, synthetic construct
  source 1..20: mol_type = other RNA
agactaggaagccacttctc

SEQ ID NO: 3334 - RNA, 20 nt, synthetic construct
  source 1..20: mol_type = other RNA
gagactaggaagccacttct

SEQ ID NO: 3335 - RNA, 20 nt, synthetic construct
  source 1..20: mol_type = other RNA
ggagactaggaagccacttc

SEQ ID NO: 3336 - RNA, 20 nt, synthetic construct
  source 1..20: mol_type = other RNA
tggagactaggaagccactt

SEQ ID NO: 3337 - RNA, 20 nt, synthetic construct
  source 1..20: mol_type = other RNA
ctggagactaggaagccact

SEQ ID NO: 3338 - RNA, 20 nt, synthetic construct
  source 1..20: mol_type = other RNA
tctggagactaggaagccac

SEQ ID NO: 3339 - RNA, 20 nt, synthetic construct
  source 1..20: mol_type = other RNA
atctggagactaggaagcca

SEQ ID NO: 3340 - RNA, 20 nt, synthetic construct
  source 1..20: mol_type = other RNA
gatctggagactaggaagcc

SEQ ID NO: 3341 - RNA, 20 nt, synthetic construct
  source 1..20: mol_type = other RNA
cgatctggagactaggaagc

SEQ ID NO: 3342 - RNA, 20 nt, synthetic construct
  source 1..20: mol_type = other RNA
ccgatctggagactaggaag

SEQ ID NO: 3343 - RNA, 20 nt, synthetic construct
  source 1..20: mol_type = other RNA
gccgatctggagactaggaa

SEQ ID NO: 3344 - RNA, 20 nt, synthetic construct
  source 1..20: mol_type = other RNA
ggccgatctggagactagga

SEQ ID NO: 3345 - RNA, 20 nt, synthetic construct
  source 1..20: mol_type = other RNA
gggccgatctggagactagg

SEQ ID NO: 3346 - RNA, 20 nt, synthetic construct
  source 1..20: mol_type = other RNA
agggccgatctggagactag

SEQ ID NO: 3347 - RNA, 20 nt, synthetic construct
  source 1..20: mol_type = other RNA
cagggccgatctggagacta

SEQ ID NO: 3348 - RNA, 20 nt, synthetic construct
  source 1..20: mol_type = other RNA
gcagggccgatctggagact

SEQ ID NO: 3349 - RNA, 20 nt, synthetic construct
  source 1..20: mol_type = other RNA
ggcagggccgatctggagac

SEQ ID NO: 3350 - RNA, 20 nt, synthetic construct
  source 1..20: mol_type = other RNA
aggcagggccgatctggaga

SEQ ID NO: 3351 - RNA, 20 nt, synthetic construct
  source 1..20: mol_type = other RNA
aaggcagggccgatctggag

SEQ ID NO: 3352 - RNA, 20 nt, synthetic construct
  source 1..20: mol_type = other RNA
gaaggcagggccgatctgga

SEQ ID NO: 3353 - RNA, 20 nt, synthetic construct
  source 1..20: mol_type = other RNA
cgaaggcagggccgatctgg

SEQ ID NO: 3354 - RNA, 20 nt, synthetic construct
  source 1..20: mol_type = other RNA
tcgaaggcagggccgatctg

SEQ ID NO: 3355 - RNA, 20 nt, synthetic construct
  source 1..20: mol_type = other RNA
ctcgaaggcagggccgatct

SEQ ID NO: 3356 - RNA, 20 nt, synthetic construct
  source 1..20: mol_type = other RNA
cctcgaaggcagggccgatc

SEQ ID NO: 3357 - RNA, 20 nt, synthetic construct
  source 1..20: mol_type = other RNA
tcctcgaaggcagggccgat

SEQ ID NO: 3358 - RNA, 20 nt, synthetic construct
  source 1..20: mol_type = other RNA
ttcctcgaaggcagggccga

SEQ ID NO: 3359 - RNA, 20 nt, synthetic construct
  source 1..20: mol_type = other RNA
attcctcgaaggcagggccg

SEQ ID NO: 3360 - RNA, 20 nt, synthetic construct
  source 1..20: mol_type = other RNA
aattcctcgaaggcagggcc

SEQ ID NO: 3361 - RNA, 20 nt, synthetic construct
  source 1..20: mol_type = other RNA
caattcctcgaaggcagggc

SEQ ID NO: 3362 - RNA, 20 nt, synthetic construct
  source 1..20: mol_type = other RNA
tcaattcctcgaaggcaggg

SEQ ID NO: 3363 - RNA, 20 nt, synthetic construct
  source 1..20: mol_type = other RNA
atcaattcctcgaaggcagg

SEQ ID NO: 3364 - RNA, 20 nt, synthetic construct
  source 1..20: mol_type = other RNA
tatcaattcctcgaaggcag

SEQ ID NO: 3365 - RNA, 20 nt, synthetic construct
  source 1..20: mol_type = other RNA
atatcaattcctcgaaggca

SEQ ID NO: 3366 - RNA, 20 nt, synthetic construct
  source 1..20: mol_type = other RNA
catatcaattcctcgaaggc

SEQ ID NO: 3367 - RNA, 20 nt, synthetic construct
  source 1..20: mol_type = other RNA
ccatatcaattcctcgaagg

SEQ ID NO: 3368 - RNA, 20 nt, synthetic construct
  source 1..20: mol_type = other RNA
cccatatcaattcctcgaag

SEQ ID NO: 3369 - RNA, 20 nt, synthetic construct
  source 1..20: mol_type = other RNA
tcccatatcaattcctcgaa

SEQ ID NO: 3370 - RNA, 20 nt, synthetic construct
  source 1..20: mol_type = other RNA
ctcccatatcaattcctcga

SEQ ID NO: 3371 - RNA, 20 nt, synthetic construct
  source 1..20: mol_type = other RNA
cctcccatatcaattcctcg

SEQ ID NO: 3372 - RNA, 20 nt, synthetic construct
  source 1..20: mol_type = other RNA
ccctcccatatcaattcctc

SEQ ID NO: 3373 - RNA, 20 nt, synthetic construct
  source 1..20: mol_type = other RNA
accctcccatatcaattcct

SEQ ID NO: 3374 - RNA, 20 nt, synthetic construct
  source 1..20: mol_type = other RNA
caccctcccatatcaattcc

SEQ ID NO: 3375 - RNA, 20 nt, synthetic construct
  source 1..20: mol_type = other RNA
tcaccctcccatatcaattc

SEQ ID NO: 3376 - RNA, 20 nt, synthetic construct
  source 1..20: mol_type = other RNA
ctcaccctcccatatcaatt

SEQ ID NO: 3377 - RNA, 20 nt, synthetic construct
  source 1..20: mol_type = other RNA
cctcaccctcccatatcaat

SEQ ID NO: 3378 - RNA, 20 nt, synthetic construct
  source 1..20: mol_type = other RNA
tcctcaccctcccatatcaa

SEQ ID NO: 3379 - RNA, 20 nt, synthetic construct
  source 1..20: mol_type = other RNA
ctcctcaccctcccatatca

SEQ ID NO: 3380 - RNA, 20 nt, synthetic construct
  source 1..20: mol_type = other RNA
tctcctcaccctcccatatc

SEQ ID NO: 3381 - RNA, 20 nt, synthetic construct
  source 1..20: mol_type = other RNA
ctctcctcaccctcccatat

SEQ ID NO: 3382 - RNA, 20 nt, synthetic construct
  source 1..20: mol_type = other RNA
tctctcctcaccctcccata

SEQ ID NO: 3383 - RNA, 20 nt, synthetic construct
  source 1..20: mol_type = other RNA
ttctctcctcaccctcccat

SEQ ID NO: 3384 - RNA, 20 nt, synthetic construct
  source 1..20: mol_type = other RNA
tttctctcctcaccctccca

SEQ ID NO: 3385 - RNA, 20 nt, synthetic construct
  source 1..20: mol_type = other RNA
ttttctctcctcaccctccc

SEQ ID NO: 3386 - RNA, 20 nt, synthetic construct
  source 1..20: mol_type = other RNA
attttctctcctcaccctcc

SEQ ID NO: 3387 - RNA, 20 nt, synthetic construct
  source 1..20: mol_type = other RNA
cattttctctcctcaccctc

SEQ ID NO: 3388 - RNA, 20 nt, synthetic construct
  source 1..20: mol_type = other RNA
acattttctctcctcaccct

SEQ ID NO: 3389 - RNA, 20 nt, synthetic construct
  source 1..20: mol_type = other RNA
tacattttctctcctcaccc

SEQ ID NO: 3390 - RNA, 20 nt, synthetic construct
  source 1..20: mol_type = other RNA
gtacattttctctcctcacc

SEQ ID NO: 3391 - RNA, 20 nt, synthetic construct
  source 1..20: mol_type = other RNA
ggtacattttctctcctcac

SEQ ID NO: 3392 - RNA, 20 nt, synthetic construct
  source 1..20: mol_type = other RNA
tggtacattttctctcctca

SEQ ID NO: 3393 - RNA, 20 nt, synthetic construct
  source 1..20: mol_type = other RNA
gtggtacattttctctcctc

SEQ ID NO: 3394 - RNA, 20 nt, synthetic construct
  source 1..20: mol_type = other RNA
tgtggtacattttctctcct

SEQ ID NO: 3395 - RNA, 20 nt, synthetic construct
  source 1..20: mol_type = other RNA
ctgtggtacattttctctcc

SEQ ID NO: 3396 - RNA, 20 nt, synthetic construct
  source 1..20: mol_type = other RNA
tctgtggtacattttctctc

SEQ ID NO: 3397 - RNA, 20 nt, synthetic construct
  source 1..20: mol_type = other RNA
ttctgtggtacattttctct

SEQ ID NO: 3398 - RNA, 20 nt, synthetic construct
  source 1..20: mol_type = other RNA
gttctgtggtacattttctc

SEQ ID NO: 3399 - RNA, 20 nt, synthetic construct
  source 1..20: mol_type = other RNA
tgttctgtggtacattttct

SEQ ID NO: 3400 - RNA, 20 nt, synthetic construct
  source 1..20: mol_type = other RNA
ctgttctgtggtacattttc

SEQ ID NO: 3401 - RNA, 20 nt, synthetic construct
  source 1..20: mol_type = other RNA
tctgttctgtggtacatttt

SEQ ID NO: 3402 - RNA, 20 nt, synthetic construct
  source 1..20: mol_type = other RNA
atctgttctgtggtacattt

SEQ ID NO: 3403 - RNA, 20 nt, synthetic construct
  source 1..20: mol_type = other RNA
aatctgttctgtggtacatt

SEQ ID NO: 3404 - RNA, 20 nt, synthetic construct
  source 1..20: mol_type = other RNA
taatctgttctgtggtacat

SEQ ID NO: 3405 - RNA, 20 nt, synthetic construct
  source 1..20: mol_type = other RNA
ctaatctgttctgtggtaca

SEQ ID NO: 3406 - RNA, 20 nt, synthetic construct
  source 1..20: mol_type = other RNA
gctaatctgttctgtggtac

SEQ ID NO: 3407 - RNA, 20 nt, synthetic construct
  source 1..20: mol_type = other RNA
ggctaatctgttctgtggta

SEQ ID NO: 3408 - RNA, 20 nt, synthetic construct
  source 1..20: mol_type = other RNA
tggctaatctgttctgtggt

SEQ ID NO: 3409 - RNA, 20 nt, synthetic construct
  source 1..20: mol_type = other RNA
ctggctaatctgttctgtgg

SEQ ID NO: 3410 - RNA, 20 nt, synthetic construct
  source 1..20: mol_type = other RNA
actggctaatctgttctgtg

SEQ ID NO: 3411 - RNA, 20 nt, synthetic construct
  source 1..20: mol_type = other RNA
cactggctaatctgttctgt

SEQ ID NO: 3412 - RNA, 20 nt, synthetic construct
  source 1..20: mol_type = other RNA
tcactggctaatctgttctg

SEQ ID NO: 3413 - RNA, 20 nt, synthetic construct
  source 1..20: mol_type = other RNA
gtcactggctaatctgttct

SEQ ID NO: 3414 - RNA, 20 nt, synthetic construct
  source 1..20: mol_type = other RNA
tgtcactggctaatctgttc

SEQ ID NO: 3415 - RNA, 20 nt, synthetic construct
  source 1..20: mol_type = other RNA
ttgtcactggctaatctgtt

SEQ ID NO: 3416 - RNA, 20 nt, synthetic construct
  source 1..20: mol_type = other RNA
cttgtcactggctaatctgt

SEQ ID NO: 3417 - RNA, 20 nt, synthetic construct
  source 1..20: mol_type = other RNA
tcttgtcactggctaatctg

SEQ ID NO: 3418 - RNA, 20 nt, synthetic construct
  source 1..20: mol_type = other RNA
ctcttgtcactggctaatct

SEQ ID NO: 3419 - RNA, 20 nt, synthetic construct
  source 1..20: mol_type = other RNA
actcttgtcactggctaatc

SEQ ID NO: 3420 - RNA, 20 nt, synthetic construct
  source 1..20: mol_type = other RNA
gactcttgtcactggctaat

SEQ ID NO: 3421 - RNA, 20 nt, synthetic construct
  source 1..20: mol_type = other RNA
tgactcttgtcactggctaa

SEQ ID NO: 3422 - RNA, 20 nt, synthetic construct
  source 1..20: mol_type = other RNA
ctgactcttgtcactggcta

SEQ ID NO: 3423 - RNA, 20 nt, synthetic construct
  source 1..20: mol_type = other RNA
gctgactcttgtcactggct

SEQ ID NO: 3424 - RNA, 20 nt, synthetic construct
  source 1..20: mol_type = other RNA
ggctgactcttgtcactggc

SEQ ID NO: 3425 - RNA, 20 nt, synthetic construct
  source 1..20: mol_type = other RNA
aggctgactcttgtcactgg

SEQ ID NO: 3426 - RNA, 20 nt, synthetic construct
  source 1..20: mol_type = other RNA
caggctgactcttgtcactg

SEQ ID NO: 3427 - RNA, 20 nt, synthetic construct
  source 1..20: mol_type = other RNA
gcaggctgactcttgtcact

SEQ ID NO: 3428 - RNA, 20 nt, synthetic construct
  source 1..20: mol_type = other RNA
agcaggctgactcttgtcac

SEQ ID NO: 3429 - RNA, 20 nt, synthetic construct
  source 1..20: mol_type = other RNA
aagcaggctgactcttgtca

SEQ ID NO: 3430 - RNA, 20 nt, synthetic construct
  source 1..20: mol_type = other RNA
caagcaggctgactcttgtc

SEQ ID NO: 3431 - RNA, 20 nt, synthetic construct
  source 1..20: mol_type = other RNA
ccaagcaggctgactcttgt

SEQ ID NO: 3432 - RNA, 20 nt, synthetic construct
  source 1..20: mol_type = other RNA
accaagcaggctgactcttg

SEQ ID NO: 3433 - RNA, 20 nt, synthetic construct
  source 1..20: mol_type = other RNA
caccaagcaggctgactctt

SEQ ID NO: 3434 - RNA, 20 nt, synthetic construct
  source 1..20: mol_type = other RNA
gcaccaagcaggctgactct

SEQ ID NO: 3435 - RNA, 20 nt, synthetic construct
  source 1..20: mol_type = other RNA
ggcaccaagcaggctgactc

SEQ ID NO: 3436 - RNA, 20 nt, synthetic construct
  source 1..20: mol_type = other RNA
tggcaccaagcaggctgact

SEQ ID NO: 3437 - RNA, 20 nt, synthetic construct
  source 1..20: mol_type = other RNA
ttggcaccaagcaggctgac

SEQ ID NO: 3438 - RNA, 20 nt, synthetic construct
  source 1..20: mol_type = other RNA
tttggcaccaagcaggctga

SEQ ID NO: 3439 - RNA, 20 nt, synthetic construct
  source 1..20: mol_type = other RNA
ctttggcaccaagcaggctg

SEQ ID NO: 3440 - RNA, 20 nt, synthetic construct
  source 1..20: mol_type = other RNA
cctttggcaccaagcaggct

SEQ ID NO: 3441 - RNA, 20 nt, synthetic construct
  source 1..20: mol_type = other RNA
ccctttggcaccaagcaggc

SEQ ID NO: 3442 - RNA, 20 nt, synthetic construct
  source 1..20: mol_type = other RNA
gccctttggcaccaagcagg

SEQ ID NO: 3443 - RNA, 20 nt, synthetic construct
  source 1..20: mol_type = other RNA
ggccctttggcaccaagcag

SEQ ID NO: 3444 - RNA, 20 nt, synthetic construct
  source 1..20: mol_type = other RNA
aggccctttggcaccaagca

SEQ ID NO: 3445 - RNA, 20 nt, synthetic construct
  source 1..20: mol_type = other RNA
caggccctttggcaccaagc

SEQ ID NO: 3446 - RNA, 20 nt, synthetic construct
  source 1..20: mol_type = other RNA
ccaggccctttggcaccaag

SEQ ID NO: 3447 - RNA, 20 nt, synthetic construct
  source 1..20: mol_type = other RNA
cccaggccctttggcaccaa

SEQ ID NO: 3448 - RNA, 20 nt, synthetic construct
  source 1..20: mol_type = other RNA
gcccaggccctttggcacca

SEQ ID NO: 3449 - RNA, 20 nt, synthetic construct
  source 1..20: mol_type = other RNA
ggcccaggccctttggcacc

SEQ ID NO: 3450 - RNA, 20 nt, synthetic construct
  source 1..20: mol_type = other RNA
tggcccaggccctttggcac

SEQ ID NO: 3451 - RNA, 20 nt, synthetic construct
  source 1..20: mol_type = other RNA
ctggcccaggccctttggca

SEQ ID NO: 3452 - RNA, 20 nt, synthetic construct
  source 1..20: mol_type = other RNA
cctggcccaggccctttggc

SEQ ID NO: 3453 - RNA, 20 nt, synthetic construct
  source 1..20: mol_type = other RNA
gcctggcccaggccctttgg

SEQ ID NO: 3454 - RNA, 20 nt, synthetic construct
  source 1..20: mol_type = other RNA
tgcctggcccaggccctttg

SEQ ID NO: 3455 - RNA, 20 nt, synthetic construct
  source 1..20: mol_type = other RNA
ctgcctggcccaggcccttt

SEQ ID NO: 3456 - RNA, 20 nt, synthetic construct
  source 1..20: mol_type = other RNA
tctgcctggcccaggccctt

SEQ ID NO: 3457 - RNA, 20 nt, synthetic construct
  source 1..20: mol_type = other RNA
ctctgcctggcccaggccct

SEQ ID NO: 3458 - RNA, 20 nt, synthetic construct
  source 1..20: mol_type = other RNA
tctctgcctggcccaggccc

SEQ ID NO: 3459 - RNA, 20 nt, synthetic construct
  source 1..20: mol_type = other RNA
atctctgcctggcccaggcc

SEQ ID NO: 3460 - RNA, 20 nt, synthetic construct
  source 1..20: mol_type = other RNA
catctctgcctggcccaggc

SEQ ID NO: 3461 - RNA, 20 nt, synthetic construct
  source 1..20: mol_type = other RNA
ccatctctgcctggcccagg

SEQ ID NO: 3462 - RNA, 20 nt, synthetic construct
  source 1..20: mol_type = other RNA
tccatctctgcctggcccag

SEQ ID NO: 3463 - RNA, 20 nt, synthetic construct
  source 1..20: mol_type = other RNA
atccatctctgcctggccca

SEQ ID NO: 3464 - RNA, 20 nt, synthetic construct
  source 1..20: mol_type = other RNA
catccatctctgcctggccc

SEQ ID NO: 3465 - RNA, 20 nt, synthetic construct
  source 1..20: mol_type = other RNA
tcatccatctctgcctggcc

SEQ ID NO: 3466 - RNA, 20 nt, synthetic construct
  source 1..20: mol_type = other RNA
atcatccatctctgcctggc

SEQ ID NO: 3467 - RNA, 20 nt, synthetic construct
  source 1..20: mol_type = other RNA
catcatccatctctgcctgg

SEQ ID NO: 3468 - RNA, 20 nt, synthetic construct
  source 1..20: mol_type = other RNA
ccatcatccatctctgcctg

SEQ ID NO: 3469 - RNA, 20 nt, synthetic construct
  source 1..20: mol_type = other RNA
cccatcatccatctctgcct

SEQ ID NO: 3470 - RNA, 20 nt, synthetic construct
  source 1..20: mol_type = other RNA
tcccatcatccatctctgcc

SEQ ID NO: 3471 - RNA, 20 nt, synthetic construct
  source 1..20: mol_type = other RNA
ctcccatcatccatctctgc

SEQ ID NO: 3472 - RNA, 20 nt, synthetic construct
  source 1..20: mol_type = other RNA
tctcccatcatccatctctg

SEQ ID NO: 3473 - RNA, 20 nt, synthetic construct
  source 1..20: mol_type = other RNA
atctcccatcatccatctct

SEQ ID NO: 3474 - RNA, 20 nt, synthetic construct
  source 1..20: mol_type = other RNA
catctcccatcatccatctc

SEQ ID NO: 3475 - RNA, 20 nt, synthetic construct
  source 1..20: mol_type = other RNA
ccatctcccatcatccatct

SEQ ID NO: 3476 - RNA, 20 nt, synthetic construct
  source 1..20: mol_type = other RNA
cccatctcccatcatccatc

SEQ ID NO: 3477 - RNA, 20 nt, synthetic construct
  source 1..20: mol_type = other RNA
gcccatctcccatcatccat

SEQ ID NO: 3478 - RNA, 20 nt, synthetic construct
  source 1..20: mol_type = other RNA
ggcccatctcccatcatcca

SEQ ID NO: 3479 - RNA, 20 nt, synthetic construct
  source 1..20: mol_type = other RNA
tggcccatctcccatcatcc

SEQ ID NO: 3480 - RNA, 20 nt, synthetic construct
  source 1..20: mol_type = other RNA
ctggcccatctcccatcatc

SEQ ID NO: 3481 - RNA, 20 nt, synthetic construct
  source 1..20: mol_type = other RNA
cctggcccatctcccatcat

SEQ ID NO: 3482 - RNA, 20 nt, synthetic construct
  source 1..20: mol_type = other RNA
tcctggcccatctcccatca

SEQ ID NO: 3483 - RNA, 20 nt, synthetic construct
  source 1..20: mol_type = other RNA
ctcctggcccatctcccatc

SEQ ID NO: 3484 - RNA, 20 nt, synthetic construct
  source 1..20: mol_type = other RNA
tctcctggcccatctcccat

SEQ ID NO: 3485 - RNA, 20 nt, synthetic construct
  source 1..20: mol_type = other RNA
ctctcctggcccatctccca

SEQ ID NO: 3486 - RNA, 20 nt, synthetic construct
  source 1..20: mol_type = other RNA
tctctcctggcccatctccc

SEQ ID NO: 3487 - RNA, 20 nt, synthetic construct
  source 1..20: mol_type = other RNA
ctctctcctggcccatctcc

SEQ ID NO: 3488 - RNA, 20 nt, synthetic construct
  source 1..20: mol_type = other RNA
cctctctcctggcccatctc

SEQ ID NO: 3489 - RNA, 20 nt, synthetic construct
  source 1..20: mol_type = other RNA
tcctctctcctggcccatct

SEQ ID NO: 3490 - RNA, 20 nt, synthetic construct
  source 1..20: mol_type = other RNA
ctcctctctcctggcccatc

SEQ ID NO: 3491 - RNA, 20 nt, synthetic construct
  source 1..20: mol_type = other RNA
tctcctctctcctggcccat

SEQ ID NO: 3492 - RNA, 20 nt, synthetic construct
  source 1..20: mol_type = other RNA
ctctcctctctcctggccca

SEQ ID NO: 3493 - RNA, 20 nt, synthetic construct
  source 1..20: mol_type = other RNA
cctctcctctctcctggccc

SEQ ID NO: 3494 - RNA, 20 nt, synthetic construct
  source 1..20: mol_type = other RNA
gcctctcctctctcctggcc

SEQ ID NO: 3495 - RNA, 20 nt, synthetic construct
  source 1..20: mol_type = other RNA
ggcctctcctctctcctggc

SEQ ID NO: 3496 - RNA, 20 nt, synthetic construct
  source 1..20: mol_type = other RNA
gggcctctcctctctcctgg

SEQ ID NO: 3497 - RNA, 20 nt, synthetic construct
  source 1..20: mol_type = other RNA
tgggcctctcctctctcctg

SEQ ID NO: 3498 - RNA, 20 nt, synthetic construct
  source 1..20: mol_type = other RNA
ctgggcctctcctctctcct

SEQ ID NO: 3499 - RNA, 20 nt, synthetic construct
  source 1..20: mol_type = other RNA
cctgggcctctcctctctcc

SEQ ID NO: 3500 - RNA, 20 nt, synthetic construct
  source 1..20: mol_type = other RNA
ccctgggcctctcctctctc

SEQ ID NO: 3501 - RNA, 20 nt, synthetic construct
  source 1..20: mol_type = other RNA
tccctgggcctctcctctct

SEQ ID NO: 3502 - RNA, 20 nt, synthetic construct
  source 1..20: mol_type = other RNA
ttccctgggcctctcctctc

SEQ ID NO: 3503 - RNA, 20 nt, synthetic construct
  source 1..20: mol_type = other RNA
tttccctgggcctctcctct

SEQ ID NO: 3504 - RNA, 20 nt, synthetic construct
  source 1..20: mol_type = other RNA
ctttccctgggcctctcctc

SEQ ID NO: 3505 - RNA, 20 nt, synthetic construct
  source 1..20: mol_type = other RNA
gctttccctgggcctctcct

SEQ ID NO: 3506 - RNA, 20 nt, synthetic construct
  source 1..20: mol_type = other RNA
ggctttccctgggcctctcc

SEQ ID NO: 3507 - RNA, 20 nt, synthetic construct
  source 1..20: mol_type = other RNA
aggctttccctgggcctctc

SEQ ID NO: 3508 - RNA, 20 nt, synthetic construct
  source 1..20: mol_type = other RNA
caggctttccctgggcctct

SEQ ID NO: 3509 - RNA, 20 nt, synthetic construct
  source 1..20: mol_type = other RNA
tcaggctttccctgggcctc

SEQ ID NO: 3510 - RNA, 20 nt, synthetic construct
  source 1..20: mol_type = other RNA
atcaggctttccctgggcct

SEQ ID NO: 3511 - RNA, 20 nt, synthetic construct
  source 1..20: mol_type = other RNA
tatcaggctttccctgggcc

SEQ ID NO: 3512 - RNA, 20 nt, synthetic construct
  source 1..20: mol_type = other RNA
gtatcaggctttccctgggc

SEQ ID NO: 3513 - RNA, 20 nt, synthetic construct
  source 1..20: mol_type = other RNA
agtatcaggctttccctggg

SEQ ID NO: 3514 - RNA, 20 nt, synthetic construct
  source 1..20: mol_type = other RNA
cagtatcaggctttccctgg

SEQ ID NO: 3515 - RNA, 20 nt, synthetic construct
  source 1..20: mol_type = other RNA
ccagtatcaggctttccctg

SEQ ID NO: 3516 - RNA, 20 nt, synthetic construct
  source 1..20: mol_type = other RNA
cccagtatcaggctttccct

SEQ ID NO: 3517 - RNA, 20 nt, synthetic construct
  source 1..20: mol_type = other RNA
gcccagtatcaggctttccc

SEQ ID NO: 3518 - RNA, 20 nt, synthetic construct
  source 1..20: mol_type = other RNA
ggcccagtatcaggctttcc

SEQ ID NO: 3519 - RNA, 20 nt, synthetic construct
  source 1..20: mol_type = other RNA
cggcccagtatcaggctttc

SEQ ID NO: 3520 - RNA, 20 nt, synthetic construct
  source 1..20: mol_type = other RNA
acggcccagtatcaggcttt

SEQ ID NO: 3521 - RNA, 20 nt, synthetic construct
  source 1..20: mol_type = other RNA
cacggcccagtatcaggctt

SEQ ID NO: 3522 - RNA, 20 nt, synthetic construct
  source 1..20: mol_type = other RNA
ccacggcccagtatcaggct

SEQ ID NO: 3523 - RNA, 20 nt, synthetic construct
  source 1..20: mol_type = other RNA
tccacggcccagtatcaggc

SEQ ID NO: 3524 - RNA, 20 nt, synthetic construct
  source 1..20: mol_type = other RNA
ctccacggcccagtatcagg

SEQ ID NO: 3525 - RNA, 20 nt, synthetic construct
  source 1..20: mol_type = other RNA
cctccacggcccagtatcag

SEQ ID NO: 3526 - RNA, 20 nt, synthetic construct
  source 1..20: mol_type = other RNA
tcctccacggcccagtatca

SEQ ID NO: 3527 - RNA, 20 nt, synthetic construct
  source 1..20: mol_type = other RNA
ttcctccacggcccagtatc

SEQ ID NO: 3528 - RNA, 20 nt, synthetic construct
  source 1..20: mol_type = other RNA
gttcctccacggcccagtat

SEQ ID NO: 3529 - RNA, 20 nt, synthetic construct
  source 1..20: mol_type = other RNA
cgttcctccacggcccagta

SEQ ID NO: 3530 - RNA, 20 nt, synthetic construct
  source 1..20: mol_type = other RNA
ccgttcctccacggcccagt

SEQ ID NO: 3531 - RNA, 20 nt, synthetic construct
  source 1..20: mol_type = other RNA
gccgttcctccacggcccag

SEQ ID NO: 3532 - RNA, 20 nt, synthetic construct
  source 1..20: mol_type = other RNA
tgccgttcctccacggccca

SEQ ID NO: 3533 - RNA, 20 nt, synthetic construct
  source 1..20: mol_type = other RNA
ctgccgttcctccacggccc

SEQ ID NO: 3534 - RNA, 20 nt, synthetic construct
  source 1..20: mol_type = other RNA
actgccgttcctccacggcc

SEQ ID NO: 3535 - RNA, 20 nt, synthetic construct
  source 1..20: mol_type = other RNA
cactgccgttcctccacggc

SEQ ID NO: 3536 - RNA, 20 nt, synthetic construct
  source 1..20: mol_type = other RNA
acactgccgttcctccacgg

SEQ ID NO: 3537 - RNA, 20 nt, synthetic construct
  source 1..20: mol_type = other RNA
gacactgccgttcctccacg

SEQ ID NO: 3538 - RNA, 20 nt, synthetic construct
  source 1..20: mol_type = other RNA
agacactgccgttcctccac

SEQ ID NO: 3539 - RNA, 20 nt, synthetic construct
  source 1..20: mol_type = other RNA
cagacactgccgttcctcca

SEQ ID NO: 3540 - RNA, 20 nt, synthetic construct
  source 1..20: mol_type = other RNA
gcagacactgccgttcctcc

SEQ ID NO: 3541 - RNA, 20 nt, synthetic construct
  source 1..20: mol_type = other RNA
tgcagacactgccgttcctc

SEQ ID NO: 3542 - RNA, 20 nt, synthetic construct
  source 1..20: mol_type = other RNA
gtgcagacactgccgttcct

SEQ ID NO: 3543 - RNA, 20 nt, synthetic construct
  source 1..20: mol_type = other RNA
tgtgcagacactgccgttcc

SEQ ID NO: 3544 - RNA, 20 nt, synthetic construct
  source 1..20: mol_type = other RNA
ctgtgcagacactgccgttc

SEQ ID NO: 3545 - RNA, 20 nt, synthetic construct
  source 1..20: mol_type = other RNA
cctgtgcagacactgccgtt

SEQ ID NO: 3546 - RNA, 20 nt, synthetic construct
  source 1..20: mol_type = other RNA
ccctgtgcagacactgccgt

SEQ ID NO: 3547 - RNA, 20 nt, synthetic construct
  source 1..20: mol_type = other RNA
cccctgtgcagacactgccg

SEQ ID NO: 3548 - RNA, 20 nt, synthetic construct
  source 1..20: mol_type = other RNA
tcccctgtgcagacactgcc

SEQ ID NO: 3549 - RNA, 20 nt, synthetic construct
  source 1..20: mol_type = other RNA
atcccctgtgcagacactgc

SEQ ID NO: 3550 - RNA, 20 nt, synthetic construct
  source 1..20: mol_type = other RNA
catcccctgtgcagacactg

SEQ ID NO: 3551 - RNA, 20 nt, synthetic construct
  source 1..20: mol_type = other RNA
ccatcccctgtgcagacact

SEQ ID NO: 3552 - RNA, 20 nt, synthetic construct
  source 1..20: mol_type = other RNA
tccatcccctgtgcagacac

SEQ ID NO: 3553 - RNA, 20 nt, synthetic construct
  source 1..20: mol_type = other RNA
ctccatcccctgtgcagaca

SEQ ID NO: 3554 - RNA, 20 nt, synthetic construct
  source 1..20: mol_type = other RNA
tctccatcccctgtgcagac

SEQ ID NO: 3555 - RNA, 20 nt, synthetic construct
  source 1..20: mol_type = other RNA
gtctccatcccctgtgcaga

SEQ ID NO: 3556 - RNA, 20 nt, synthetic construct
  source 1..20: mol_type = other RNA
agtctccatcccctgtgcag

SEQ ID NO: 3557 - RNA, 20 nt, synthetic construct
  source 1..20: mol_type = other RNA
cagtctccatcccctgtgca

SEQ ID NO: 3558 - RNA, 20 nt, synthetic construct
  source 1..20: mol_type = other RNA
gcagtctccatcccctgtgc

SEQ ID NO: 3559 - RNA, 20 nt, synthetic construct
  source 1..20: mol_type = other RNA
agcagtctccatcccctgtg

SEQ ID NO: 3560 - RNA, 20 nt, synthetic construct
  source 1..20: mol_type = other RNA
cagcagtctccatcccctgt

SEQ ID NO: 3561 - RNA, 20 nt, synthetic construct
  source 1..20: mol_type = other RNA
gcagcagtctccatcccctg

SEQ ID NO: 3562 - RNA, 20 nt, synthetic construct
  source 1..20: mol_type = other RNA
tgcagcagtctccatcccct

SEQ ID NO: 3563 - RNA, 20 nt, synthetic construct
  source 1..20: mol_type = other RNA
ctgcagcagtctccatcccc

SEQ ID NO: 3564 - RNA, 20 nt, synthetic construct
  source 1..20: mol_type = other RNA
gctgcagcagtctccatccc

SEQ ID NO: 3565 - RNA, 20 nt, synthetic construct
  source 1..20: mol_type = other RNA
ggctgcagcagtctccatcc

SEQ ID NO: 3566 - RNA, 20 nt, synthetic construct
  source 1..20: mol_type = other RNA
aggctgcagcagtctccatc

SEQ ID NO: 3567 - RNA, 20 nt, synthetic construct
  source 1..20: mol_type = other RNA
caggctgcagcagtctccat

SEQ ID NO: 3568 - RNA, 20 nt, synthetic construct
  source 1..20: mol_type = other RNA
tcaggctgcagcagtctcca

SEQ ID NO: 3569 - RNA, 20 nt, synthetic construct
  source 1..20: mol_type = other RNA
ctcaggctgcagcagtctcc

SEQ ID NO: 3570 - RNA, 20 nt, synthetic construct
  source 1..20: mol_type = other RNA
gctcaggctgcagcagtctc

SEQ ID NO: 3571 - RNA, 20 nt, synthetic construct
  source 1..20: mol_type = other RNA
tgctcaggctgcagcagtct

SEQ ID NO: 3572 - RNA, 20 nt, synthetic construct
  source 1..20: mol_type = other RNA
ttgctcaggctgcagcagtc

SEQ ID NO: 3573 - RNA, 20 nt, synthetic construct
  source 1..20: mol_type = other RNA
cttgctcaggctgcagcagt

SEQ ID NO: 3574 - RNA, 20 nt, synthetic construct
  source 1..20: mol_type = other RNA
ccttgctcaggctgcagcag

SEQ ID NO: 3575 - RNA, 20 nt, synthetic construct
  source 1..20: mol_type = other RNA
tccttgctcaggctgcagca

SEQ ID NO: 3576 - RNA, 20 nt, synthetic construct
  source 1..20: mol_type = other RNA
ttccttgctcaggctgcagc

SEQ ID NO: 3577 - RNA, 20 nt, synthetic construct
  source 1..20: mol_type = other RNA
gttccttgctcaggctgcag

SEQ ID NO: 3578 - RNA, 20 nt, synthetic construct
  source 1..20: mol_type = other RNA
agttccttgctcaggctgca

SEQ ID NO: 3579 - RNA, 20 nt, synthetic construct
  source 1..20: mol_type = other RNA
cagttccttgctcaggctgc

SEQ ID NO: 3580 - RNA, 20 nt, synthetic construct
  source 1..20: mol_type = other RNA
ccagttccttgctcaggctg

SEQ ID NO: 3581 - RNA, 20 nt, synthetic construct
  source 1..20: mol_type = other RNA
tccagttccttgctcaggct

SEQ ID NO: 3582 - RNA, 20 nt, synthetic construct
  source 1..20: mol_type = other RNA
ctccagttccttgctcaggc

SEQ ID NO: 3583 - RNA, 20 nt, synthetic construct
  source 1..20: mol_type = other RNA
gctccagttccttgctcagg

SEQ ID NO: 3584 - RNA, 20 nt, synthetic construct
  source 1..20: mol_type = other RNA
agctccagttccttgctcag

SEQ ID NO: 3585 - RNA, 20 nt, synthetic construct
  source 1..20: mol_type = other RNA
cagctccagttccttgctca

SEQ ID NO: 3586 - RNA, 20 nt, synthetic construct
  source 1..20: mol_type = other RNA
tcagctccagttccttgctc

SEQ ID NO: 3587 - RNA, 20 nt, synthetic construct
  source 1..20: mol_type = other RNA
ctcagctccagttccttgct

SEQ ID NO: 3588 - RNA, 20 nt, synthetic construct
  source 1..20: mol_type = other RNA
cctcagctccagttccttgc

SEQ ID NO: 3589 - RNA, 20 nt, synthetic construct
  source 1..20: mol_type = other RNA
tcctcagctccagttccttg

SEQ ID NO: 3590 - RNA, 20 nt, synthetic construct
  source 1..20: mol_type = other RNA
atcctcagctccagttcctt

SEQ ID NO: 3591 - RNA, 20 nt, synthetic construct
  source 1..20: mol_type = other RNA
catcctcagctccagttcct

SEQ ID NO: 3592 - RNA, 20 nt, synthetic construct
  source 1..20: mol_type = other RNA
tcatcctcagctccagttcc

SEQ ID NO: 3593 - RNA, 20 nt, synthetic construct
  source 1..20: mol_type = other RNA
ctcatcctcagctccagttc

SEQ ID NO: 3594 - RNA, 20 nt, synthetic construct
  source 1..20: mol_type = other RNA
cctcatcctcagctccagtt

SEQ ID NO: 3595 - RNA, 20 nt, synthetic construct
  source 1..20: mol_type = other RNA
gcctcatcctcagctccagt

SEQ ID NO: 3596 - RNA, 20 nt, synthetic construct
  source 1..20: mol_type = other RNA
tgcctcatcctcagctccag

SEQ ID NO: 3597 - RNA, 20 nt, synthetic construct
  source 1..20: mol_type = other RNA
ctgcctcatcctcagctcca

SEQ ID NO: 3598 - RNA, 20 nt, synthetic construct
  source 1..20: mol_type = other RNA
cctgcctcatcctcagctcc

SEQ ID NO: 3599 - RNA, 20 nt, synthetic construct
  source 1..20: mol_type = other RNA
ccctgcctcatcctcagctc

SEQ ID NO: 3600 - RNA, 20 nt, synthetic construct
  source 1..20: mol_type = other RNA
cccctgcctcatcctcagct

SEQ ID NO: 3601 - RNA, 20 nt, synthetic construct
  source 1..20: mol_type = other RNA
gcccctgcctcatcctcagc

SEQ ID NO: 3602 - RNA, 20 nt, synthetic construct
  source 1..20: mol_type = other RNA
tgcccctgcctcatcctcag

SEQ ID NO: 3603 - RNA, 20 nt, synthetic construct
  source 1..20: mol_type = other RNA
ctgcccctgcctcatcctca

SEQ ID NO: 3604 - RNA, 20 nt, synthetic construct
  source 1..20: mol_type = other RNA
cctgcccctgcctcatcctc

SEQ ID NO: 3605 - RNA, 20 nt, synthetic construct
  source 1..20: mol_type = other RNA
ccctgcccctgcctcatcct

SEQ ID NO: 3606 - RNA, 20 nt, synthetic construct
  source 1..20: mol_type = other RNA
cccctgcccctgcctcatcc

SEQ ID NO: 3607 - RNA, 20 nt, synthetic construct
  source 1..20: mol_type = other RNA
ccccctgcccctgcctcatc

SEQ ID NO: 3608 - RNA, 20 nt, synthetic construct
  source 1..20: mol_type = other RNA
tccccctgcccctgcctcat

SEQ ID NO: 3609 - RNA, 20 nt, synthetic construct
  source 1..20: mol_type = other RNA
atccccctgcccctgcctca

SEQ ID NO: 3610 - RNA, 20 nt, synthetic construct
  source 1..20: mol_type = other RNA
catccccctgcccctgcctc

SEQ ID NO: 3611 - RNA, 20 nt, synthetic construct
  source 1..20: mol_type = other RNA
ccatccccctgcccctgcct

SEQ ID NO: 3612 - RNA, 20 nt, synthetic construct
  source 1..20: mol_type = other RNA
gccatccccctgcccctgcc

SEQ ID NO: 3613 - RNA, 20 nt, synthetic construct
  source 1..20: mol_type = other RNA
agccatccccctgcccctgc

SEQ ID NO: 3614 - RNA, 20 nt, synthetic construct
  source 1..20: mol_type = other RNA
tagccatccccctgcccctg

SEQ ID NO: 3615 - RNA, 20 nt, synthetic construct
  source 1..20: mol_type = other RNA
ttagccatccccctgcccct

SEQ ID NO: 3616 - RNA, 20 nt, synthetic construct
  source 1..20: mol_type = other RNA
gttagccatccccctgcccc

SEQ ID NO: 3617 - RNA, 20 nt, synthetic construct
  source 1..20: mol_type = other RNA
ggttagccatccccctgccc

SEQ ID NO: 3618 - RNA, 20 nt, synthetic construct
  source 1..20: mol_type = other RNA
tggttagccatccccctgcc

SEQ ID NO: 3619 - RNA, 20 nt, synthetic construct
  source 1..20: mol_type = other RNA
ttggttagccatccccctgc

SEQ ID NO: 3620 - RNA, 20 nt, synthetic construct
  source 1..20: mol_type = other RNA
cttggttagccatccccctg

SEQ ID NO: 3621 - RNA, 20 nt, synthetic construct
  source 1..20: mol_type = other RNA
gcttggttagccatccccct

SEQ ID NO: 3622 - RNA, 20 nt, synthetic construct
  source 1..20: mol_type = other RNA
agcttggttagccatccccc

SEQ ID NO: 3623 - RNA, 20 nt, synthetic construct
  source 1..20: mol_type = other RNA
gagcttggttagccatcccc

SEQ ID NO: 3624 - RNA, 20 nt, synthetic construct
  source 1..20: mol_type = other RNA
cgagcttggttagccatccc

SEQ ID NO: 3625 - RNA, 20 nt, synthetic construct
  source 1..20: mol_type = other RNA
tcgagcttggttagccatcc

SEQ ID NO: 3626 - RNA, 20 nt, synthetic construct
  source 1..20: mol_type = other RNA
ctcgagcttggttagccatc

SEQ ID NO: 3627 - RNA, 20 nt, synthetic construct
  source 1..20: mol_type = other RNA
cctcgagcttggttagccat

SEQ ID NO: 3628 - RNA, 20 nt, synthetic construct
  source 1..20: mol_type = other RNA
gcctcgagcttggttagcca

SEQ ID NO: 3629 - RNA, 20 nt, synthetic construct
  source 1..20: mol_type = other RNA
tgcctcgagcttggttagcc

SEQ ID NO: 3630 - RNA, 20 nt, synthetic construct
  source 1..20: mol_type = other RNA
ctgcctcgagcttggttagc

SEQ ID NO: 3631 - RNA, 20 nt, synthetic construct
  source 1..20: mol_type = other RNA
gctgcctcgagcttggttag

SEQ ID NO: 3632 - RNA, 20 nt, synthetic construct
  source 1..20: mol_type = other RNA
tgctgcctcgagcttggtta

SEQ ID NO: 3633 - RNA, 20 nt, synthetic construct
  source 1..20: mol_type = other RNA
ctgctgcctcgagcttggtt

SEQ ID NO: 3634 - RNA, 20 nt, synthetic construct
  source 1..20: mol_type = other RNA
tctgctgcctcgagcttggt

SEQ ID NO: 3635 - RNA, 20 nt, synthetic construct
  source 1..20: mol_type = other RNA
ttctgctgcctcgagcttgg

SEQ ID NO: 3636 - RNA, 20 nt, synthetic construct
  source 1..20: mol_type = other RNA
cttctgctgcctcgagcttg

SEQ ID NO: 3637 - RNA, 20 nt, synthetic construct
  source 1..20: mol_type = other RNA
acttctgctgcctcgagctt

SEQ ID NO: 3638 - RNA, 20 nt, synthetic construct
  source 1..20: mol_type = other RNA
gacttctgctgcctcgagct

SEQ ID NO: 3639 - RNA, 20 nt, synthetic construct
  source 1..20: mol_type = other RNA
cgacttctgctgcctcgagc

SEQ ID NO: 3640 - RNA, 20 nt, synthetic construct
  source 1..20: mol_type = other RNA
ccgacttctgctgcctcgag

SEQ ID NO: 3641 - RNA, 20 nt, synthetic construct
  source 1..20: mol_type = other RNA
tccgacttctgctgcctcga

SEQ ID NO: 3642 - RNA, 20 nt, synthetic construct
  source 1..20: mol_type = other RNA
ctccgacttctgctgcctcg

SEQ ID NO: 3643 - RNA, 20 nt, synthetic construct
  source 1..20: mol_type = other RNA
cctccgacttctgctgcctc

SEQ ID NO: 3644 - RNA, 20 nt, synthetic construct
  source 1..20: mol_type = other RNA
tcctccgacttctgctgcct

SEQ ID NO: 3645 - RNA, 20 nt, synthetic construct
  source 1..20: mol_type = other RNA
ctcctccgacttctgctgcc

SEQ ID NO: 3646 - RNA, 20 nt, synthetic construct
  source 1..20: mol_type = other RNA
cctcctccgacttctgctgc

SEQ ID NO: 3647 - RNA, 20 nt, synthetic construct
  source 1..20: mol_type = other RNA
ccctcctccgacttctgctg

SEQ ID NO: 3648 - RNA, 20 nt, synthetic construct
  source 1..20: mol_type = other RNA
tccctcctccgacttctgct

SEQ ID NO: 3649 - RNA, 20 nt, synthetic construct
  source 1..20: mol_type = other RNA
ttccctcctccgacttctgc

SEQ ID NO: 3650 - RNA, 20 nt, synthetic construct
  source 1..20: mol_type = other RNA
tttccctcctccgacttctg

SEQ ID NO: 3651 - RNA, 20 nt, synthetic construct
  source 1..20: mol_type = other RNA
ctttccctcctccgacttct

SEQ ID NO: 3652 - RNA, 20 nt, synthetic construct
  source 1..20: mol_type = other RNA
cctttccctcctccgacttc

SEQ ID NO: 3653 - RNA, 20 nt, synthetic construct
  source 1..20: mol_type = other RNA
ccctttccctcctccgactt

SEQ ID NO: 3654 - RNA, 20 nt, synthetic construct
  source 1..20: mol_type = other RNA
accctttccctcctccgact

SEQ ID NO: 3655 - RNA, 20 nt, synthetic construct
  source 1..20: mol_type = other RNA
caccctttccctcctccgac

SEQ ID NO: 3656 - RNA, 20 nt, synthetic construct
  source 1..20: mol_type = other RNA
gcaccctttccctcctccga

SEQ ID NO: 3657 - RNA, 20 nt, synthetic construct
  source 1..20: mol_type = other RNA
ggcaccctttccctcctccg

SEQ ID NO: 3658 - RNA, 20 nt, synthetic construct
  source 1..20: mol_type = other RNA
tggcaccctttccctcctcc

SEQ ID NO: 3659 - RNA, 20 nt, synthetic construct
  source 1..20: mol_type = other RNA
ttggcaccctttccctcctc

SEQ ID NO: 3660 - RNA, 20 nt, synthetic construct
  source 1..20: mol_type = other RNA
gttggcaccctttccctcct

SEQ ID NO: 3661 - RNA, 20 nt, synthetic construct
  source 1..20: mol_type = other RNA
ggttggcaccctttccctcc

SEQ ID NO: 3662 - RNA, 20 nt, synthetic construct
  source 1..20: mol_type = other RNA
cggttggcaccctttccctc

SEQ ID NO: 3663 - RNA, 20 nt, synthetic construct
  source 1..20: mol_type = other RNA
tcggttggcaccctttccct

SEQ ID NO: 3664 - RNA, 20 nt, synthetic construct
  source 1..20: mol_type = other RNA
ctcggttggcaccctttccc

SEQ ID NO: 3665 - RNA, 20 nt, synthetic construct
  source 1..20: mol_type = other RNA
gctcggttggcaccctttcc

SEQ ID NO: 3666 - RNA, 20 nt, synthetic construct
  source 1..20: mol_type = other RNA
agctcggttggcaccctttc

SEQ ID NO: 3667 - RNA, 20 nt, synthetic construct
  source 1..20: mol_type = other RNA
cagctcggttggcacccttt

SEQ ID NO: 3668 - RNA, 20 nt, synthetic construct
  source 1..20: mol_type = other RNA
acagctcggttggcaccctt

SEQ ID NO: 3669 - RNA, 20 nt, synthetic construct
  source 1..20: mol_type = other RNA
cacagctcggttggcaccct

SEQ ID NO: 3670 - RNA, 20 nt, synthetic construct
  source 1..20: mol_type = other RNA
ccacagctcggttggcaccc

SEQ ID NO: 3671 - RNA, 20 nt, synthetic construct
  source 1..20: mol_type = other RNA
tccacagctcggttggcacc

SEQ ID NO: 3672 - RNA, 20 nt, synthetic construct
  source 1..20: mol_type = other RNA
ctccacagctcggttggcac

SEQ ID NO: 3673 - RNA, 20 nt, synthetic construct
  source 1..20: mol_type = other RNA
actccacagctcggttggca

SEQ ID NO: 3674 - RNA, 20 nt, synthetic construct
  source 1..20: mol_type = other RNA
gactccacagctcggttggc

SEQ ID NO: 3675 - RNA, 20 nt, synthetic construct
  source 1..20: mol_type = other RNA
cgactccacagctcggttgg

SEQ ID NO: 3676 - RNA, 20 nt, synthetic construct
  source 1..20: mol_type = other RNA
acgactccacagctcggttg

SEQ ID NO: 3677 - RNA, 20 nt, synthetic construct
  source 1..20: mol_type = other RNA
cacgactccacagctcggtt

SEQ ID NO: 3678 - RNA, 20 nt, synthetic construct
  source 1..20: mol_type = other RNA
acacgactccacagctcggt

SEQ ID NO: 3679 - RNA, 20 nt, synthetic construct
  source 1..20: mol_type = other RNA
cacacgactccacagctcgg

SEQ ID NO: 3680 - RNA, 20 nt, synthetic construct
  source 1..20: mol_type = other RNA
ccacacgactccacagctcg

SEQ ID NO: 3681 - RNA, 20 nt, synthetic construct
  source 1..20: mol_type = other RNA
gccacacgactccacagctc

SEQ ID NO: 3682 - RNA, 20 nt, synthetic construct
  source 1..20: mol_type = other RNA
tgccacacgactccacagct

SEQ ID NO: 3683 - RNA, 20 nt, synthetic construct
  source 1..20: mol_type = other RNA
ctgccacacgactccacagc

SEQ ID NO: 3684 - RNA, 20 nt, synthetic construct
  source 1..20: mol_type = other RNA
cctgccacacgactccacag

SEQ ID NO: 3685 - RNA, 20 nt, synthetic construct
  source 1..20: mol_type = other RNA
ccctgccacacgactccaca

SEQ ID NO: 3686 - RNA, 20 nt, synthetic construct
  source 1..20: mol_type = other RNA
cccctgccacacgactccac

SEQ ID NO: 3687 - RNA, 20 nt, synthetic construct
  source 1..20: mol_type = other RNA
acccctgccacacgactcca

SEQ ID NO: 3688 - RNA, 20 nt, synthetic construct
  source 1..20: mol_type = other RNA
aacccctgccacacgactcc

SEQ ID NO: 3689 - RNA, 20 nt, synthetic construct
  source 1..20: mol_type = other RNA
gaacccctgccacacgactc

SEQ ID NO: 3690 - RNA, 20 nt, synthetic construct
  source 1..20: mol_type = other RNA
agaacccctgccacacgact

SEQ ID NO: 3691 - RNA, 20 nt, synthetic construct
  source 1..20: mol_type = other RNA
tagaacccctgccacacgac

SEQ ID NO: 3692 - RNA, 20 nt, synthetic construct
  source 1..20: mol_type = other RNA
ttagaacccctgccacacga

SEQ ID NO: 3693 - RNA, 20 nt, synthetic construct
  source 1..20: mol_type = other RNA
cttagaacccctgccacacg

SEQ ID NO: 3694 - RNA, 20 nt, synthetic construct
  source 1..20: mol_type = other RNA
gcttagaacccctgccacac

SEQ ID NO: 3695 - RNA, 20 nt, synthetic construct
  source 1..20: mol_type = other RNA
ggcttagaacccctgccaca

SEQ ID NO: 3696 - RNA, 20 nt, synthetic construct
  source 1..20: mol_type = other RNA
aggcttagaacccctgccac

SEQ ID NO: 3697 - RNA, 20 nt, synthetic construct
  source 1..20: mol_type = other RNA
caggcttagaacccctgcca

SEQ ID NO: 3698 - RNA, 20 nt, synthetic construct
  source 1..20: mol_type = other RNA
ccaggcttagaacccctgcc

SEQ ID NO: 3699 - RNA, 20 nt, synthetic construct
  source 1..20: mol_type = other RNA
tccaggcttagaacccctgc

SEQ ID NO: 3700 - RNA, 20 nt, synthetic construct
  source 1..20: mol_type = other RNA
ctccaggcttagaacccctg

SEQ ID NO: 3701 - RNA, 20 nt, synthetic construct
  source 1..20: mol_type = other RNA
gctccaggcttagaacccct

SEQ ID NO: 3702 - RNA, 20 nt, synthetic construct
  source 1..20: mol_type = other RNA
agctccaggcttagaacccc

SEQ ID NO: 3703 - RNA, 20 nt, synthetic construct
  source 1..20: mol_type = other RNA
tagctccaggcttagaaccc

SEQ ID NO: 3704 - RNA, 20 nt, synthetic construct
  source 1..20: mol_type = other RNA
ctagctccaggcttagaacc

SEQ ID NO: 3705 - RNA, 20 nt, synthetic construct
  source 1..20: mol_type = other RNA
tctagctccaggcttagaac

SEQ ID NO: 3706 - RNA, 20 nt, synthetic construct
  source 1..20: mol_type = other RNA
ctctagctccaggcttagaa

SEQ ID NO: 3707 - RNA, 20 nt, synthetic construct
  source 1..20: mol_type = other RNA
gctctagctccaggcttaga

SEQ ID NO: 3708 - RNA, 20 nt, synthetic construct
  source 1..20: mol_type = other RNA
tgctctagctccaggcttag

SEQ ID NO: 3709 - RNA, 20 nt, synthetic construct
  source 1..20: mol_type = other RNA
ctgctctagctccaggctta

SEQ ID NO: 3710 - RNA, 20 nt, synthetic construct
  source 1..20: mol_type = other RNA
tctgctctagctccaggctt

SEQ ID NO: 3711 - RNA, 20 nt, synthetic construct
  source 1..20: mol_type = other RNA
gtctgctctagctccaggct

SEQ ID NO: 3712 - RNA, 20 nt, synthetic construct
  source 1..20: mol_type = other RNA
ggtctgctctagctccaggc

SEQ ID NO: 3713 - RNA, 20 nt, synthetic construct
  source 1..20: mol_type = other RNA
gggtctgctctagctccagg

SEQ ID NO: 3714 - RNA, 20 nt, synthetic construct
  source 1..20: mol_type = other RNA
tgggtctgctctagctccag

SEQ ID NO: 3715 - RNA, 20 nt, synthetic construct
  source 1..20: mol_type = other RNA
ctgggtctgctctagctcca

SEQ ID NO: 3716 - RNA, 20 nt, synthetic construct
  source 1..20: mol_type = other RNA
tctgggtctgctctagctcc

SEQ ID NO: 3717 - RNA, 20 nt, synthetic construct
  source 1..20: mol_type = other RNA
gtctgggtctgctctagctc

SEQ ID NO: 3718 - RNA, 20 nt, synthetic construct
  source 1..20: mol_type = other RNA
tgtctgggtctgctctagct

SEQ ID NO: 3719 - RNA, 20 nt, synthetic construct
  source 1..20: mol_type = other RNA
ctgtctgggtctgctctagc

SEQ ID NO: 3720 - RNA, 20 nt, synthetic construct
  source 1..20: mol_type = other RNA
gctgtctgggtctgctctag

SEQ ID NO: 3721 - RNA, 20 nt, synthetic construct
  source 1..20: mol_type = other RNA
cgctgtctgggtctgctcta

SEQ ID NO: 3722 - RNA, 20 nt, synthetic construct
  source 1..20: mol_type = other RNA
ccgctgtctgggtctgctct

SEQ ID NO: 3723 - RNA, 20 nt, synthetic construct
  source 1..20: mol_type = other RNA
tccgctgtctgggtctgctc

SEQ ID NO: 3724 - RNA, 20 nt, synthetic construct
  source 1..20: mol_type = other RNA
atccgctgtctgggtctgct

SEQ ID NO: 3725 - RNA, 20 nt, synthetic construct
  source 1..20: mol_type = other RNA
tatccgctgtctgggtctgc

SEQ ID NO: 3726 - RNA, 20 nt, synthetic construct
  source 1..20: mol_type = other RNA
ttatccgctgtctgggtctg

SEQ ID NO: 3727 - RNA, 20 nt, synthetic construct
  source 1..20: mol_type = other RNA
cttatccgctgtctgggtct

SEQ ID NO: 3728 - RNA, 20 nt, synthetic construct
  source 1..20: mol_type = other RNA
tcttatccgctgtctgggtc

SEQ ID NO: 3729 - RNA, 20 nt, synthetic construct
  source 1..20: mol_type = other RNA
gtcttatccgctgtctgggt

SEQ ID NO: 3730 - RNA, 20 nt, synthetic construct
  source 1..20: mol_type = other RNA
tgtcttatccgctgtctggg

SEQ ID NO: 3731 - RNA, 20 nt, synthetic construct
  source 1..20: mol_type = other RNA
gtgtcttatccgctgtctgg

SEQ ID NO: 3732 - RNA, 20 nt, synthetic construct
  source 1..20: mol_type = other RNA
ggtgtcttatccgctgtctg

SEQ ID NO: 3733 - RNA, 20 nt, synthetic construct
  source 1..20: mol_type = other RNA
aggtgtcttatccgctgtct

SEQ ID NO: 3734 - RNA, 20 nt, synthetic construct
  source 1..20: mol_type = other RNA
caggtgtcttatccgctgtc

SEQ ID NO: 3735 - RNA, 20 nt, synthetic construct
  source 1..20: mol_type = other RNA
ccaggtgtcttatccgctgt

SEQ ID NO: 3736 - RNA, 20 nt, synthetic construct
  source 1..20: mol_type = other RNA
gccaggtgtcttatccgctg

SEQ ID NO: 3737 - RNA, 20 nt, synthetic construct
  source 1..20: mol_type = other RNA
ggccaggtgtcttatccgct

SEQ ID NO: 3738 - RNA, 20 nt, synthetic construct
  source 1..20: mol_type = other RNA
aggccaggtgtcttatccgc

SEQ ID NO: 3739 - RNA, 20 nt, synthetic construct
  source 1..20: mol_type = other RNA
caggccaggtgtcttatccg

SEQ ID NO: 3740 - RNA, 20 nt, synthetic construct
  source 1..20: mol_type = other RNA
gcaggccaggtgtcttatcc

SEQ ID NO: 3741 - RNA, 20 nt, synthetic construct
  source 1..20: mol_type = other RNA
agcaggccaggtgtcttatc

SEQ ID NO: 3742 - RNA, 20 nt, synthetic construct
  source 1..20: mol_type = other RNA
cagcaggccaggtgtcttat

SEQ ID NO: 3743 - RNA, 20 nt, synthetic construct
  source 1..20: mol_type = other RNA
tcagcaggccaggtgtctta

SEQ ID NO: 3744 - RNA, 20 nt, synthetic construct
  source 1..20: mol_type = other RNA
ctcagcaggccaggtgtctt

SEQ ID NO: 3745 - RNA, 20 nt, synthetic construct
  source 1..20: mol_type = other RNA
cctcagcaggccaggtgtct

SEQ ID NO: 3746 - RNA, 20 nt, synthetic construct
  source 1..20: mol_type = other RNA
tcctcagcaggccaggtgtc

SEQ ID NO: 3747 - RNA, 20 nt, synthetic construct
  source 1..20: mol_type = other RNA
gtcctcagcaggccaggtgt

SEQ ID NO: 3748 - RNA, 20 nt, synthetic construct
  source 1..20: mol_type = other RNA
ggtcctcagcaggccaggtg

SEQ ID NO: 3749 - RNA, 20 nt, synthetic construct
  source 1..20: mol_type = other RNA
aggtcctcagcaggccaggt

SEQ ID NO: 3750 - RNA, 20 nt, synthetic construct
  source 1..20: mol_type = other RNA
taggtcctcagcaggccagg

SEQ ID NO: 3751 - RNA, 20 nt, synthetic construct
  source 1..20: mol_type = other RNA
ctaggtcctcagcaggccag

SEQ ID NO: 3752 - RNA, 20 nt, synthetic construct
  source 1..20: mol_type = other RNA
actaggtcctcagcaggcca

SEQ ID NO: 3753 - RNA, 20 nt, synthetic construct
  source 1..20: mol_type = other RNA
tactaggtcctcagcaggcc

SEQ ID NO: 3754 - RNA, 20 nt, synthetic construct
  source 1..20: mol_type = other RNA
gtactaggtcctcagcaggc

SEQ ID NO: 3755 - RNA, 20 nt, synthetic construct
  source 1..20: mol_type = other RNA
agtactaggtcctcagcagg

SEQ ID NO: 3756 - RNA, 20 nt, synthetic construct
  source 1..20: mol_type = other RNA
tagtactaggtcctcagcag

SEQ ID NO: 3757 - RNA, 20 nt, synthetic construct
  source 1..20: mol_type = other RNA
ctagtactaggtcctcagca

SEQ ID NO: 3758 - RNA, 20 nt, synthetic construct
  source 1..20: mol_type = other RNA
actagtactaggtcctcagc

SEQ ID NO: 3759 - RNA, 20 nt, synthetic construct
  source 1..20: mol_type = other RNA
gactagtactaggtcctcag

SEQ ID NO: 3760 - RNA, 20 nt, synthetic construct
  source 1..20: mol_type = other RNA
agactagtactaggtcctca

SEQ ID NO: 3761 - RNA, 20 nt, synthetic construct
  source 1..20: mol_type = other RNA
cagactagtactaggtcctc

SEQ ID NO: 3762 - RNA, 20 nt, synthetic construct
  source 1..20: mol_type = other RNA
acagactagtactaggtcct

SEQ ID NO: 3763 - RNA, 20 nt, synthetic construct
  source 1..20: mol_type = other RNA
cacagactagtactaggtcc

SEQ ID NO: 3764 - RNA, 20 nt, synthetic construct
  source 1..20: mol_type = other RNA
gcacagactagtactaggtc

SEQ ID NO: 3765 - RNA, 20 nt, synthetic construct
  source 1..20: mol_type = other RNA
ggcacagactagtactaggt

SEQ ID NO: 3766 - RNA, 20 nt, synthetic construct
  source 1..20: mol_type = other RNA
gggcacagactagtactagg

SEQ ID NO: 3767 - RNA, 20 nt, synthetic construct
  source 1..20: mol_type = other RNA
agggcacagactagtactag

SEQ ID NO: 3768 - RNA, 20 nt, synthetic construct
  source 1..20: mol_type = other RNA
cagggcacagactagtacta

SEQ ID NO: 3769 - RNA, 20 nt, synthetic construct
  source 1..20: mol_type = other RNA
ccagggcacagactagtact

SEQ ID NO: 3770 - RNA, 20 nt, synthetic construct
  source 1..20: mol_type = other RNA
accagggcacagactagtac

SEQ ID NO: 3771 - RNA, 20 nt, synthetic construct
  source 1..20: mol_type = other RNA
caccagggcacagactagta

SEQ ID NO: 3772 - RNA, 20 nt, synthetic construct
  source 1..20: mol_type = other RNA
tcaccagggcacagactagt

SEQ ID NO: 3773 - RNA, 20 nt, synthetic construct
  source 1..20: mol_type = other RNA
gtcaccagggcacagactag

SEQ ID NO: 3774 - RNA, 20 nt, synthetic construct
  source 1..20: mol_type = other RNA
tgtcaccagggcacagacta

SEQ ID NO: 3775 - RNA, 20 nt, synthetic construct
  source 1..20: mol_type = other RNA
gtgtcaccagggcacagact

SEQ ID NO: 3776 - RNA, 20 nt, synthetic construct
  source 1..20: mol_type = other RNA
tgtgtcaccagggcacagac

SEQ ID NO: 3777 - RNA, 20 nt, synthetic construct
  source 1..20: mol_type = other RNA
atgtgtcaccagggcacaga

SEQ ID NO: 3778 - RNA, 20 nt, synthetic construct
  source 1..20: mol_type = other RNA
aatgtgtcaccagggcacag

SEQ ID NO: 3779 - RNA, 20 nt, synthetic construct
  source 1..20: mol_type = other RNA
aaatgtgtcaccagggcaca

SEQ ID NO: 3780 - RNA, 20 nt, synthetic construct
  source 1..20: mol_type = other RNA
caaatgtgtcaccagggcac

SEQ ID NO: 3781 - RNA, 20 nt, synthetic construct
  source 1..20: mol_type = other RNA
acaaatgtgtcaccagggca

SEQ ID NO: 3782 - RNA, 20 nt, synthetic construct
  source 1..20: mol_type = other RNA
cacaaatgtgtcaccagggc

SEQ ID NO: 3783 - RNA, 20 nt, synthetic construct
  source 1..20: mol_type = other RNA
gcacaaatgtgtcaccaggg

SEQ ID NO: 3784 - RNA, 20 nt, synthetic construct
  source 1..20: mol_type = other RNA
agcacaaatgtgtcaccagg

SEQ ID NO: 3785 - RNA, 20 nt, synthetic construct
  source 1..20: mol_type = other RNA
aagcacaaatgtgtcaccag

SEQ ID NO: 3786 - RNA, 20 nt, synthetic construct
  source 1..20: mol_type = other RNA
taagcacaaatgtgtcacca

SEQ ID NO: 3787 - RNA, 20 nt, synthetic construct
  source 1..20: mol_type = other RNA
ataagcacaaatgtgtcacc

SEQ ID NO: 3788 - RNA, 20 nt, synthetic construct
  source 1..20: mol_type = other RNA
aataagcacaaatgtgtcac

SEQ ID NO: 3789 - RNA, 20 nt, synthetic construct
  source 1..20: mol_type = other RNA
aaataagcacaaatgtgtca

SEQ ID NO: 3790 - RNA, 20 nt, synthetic construct
  source 1..20: mol_type = other RNA
aaaataagcacaaatgtgtc

SEQ ID NO: 3791 - RNA, 20 nt, synthetic construct
  source 1..20: mol_type = other RNA
gaaaataagcacaaatgtgt

SEQ ID NO: 3792 - RNA, 20 nt, synthetic construct
  source 1..20: mol_type = other RNA
ggaaaataagcacaaatgtg

SEQ ID NO: 3793 - RNA, 20 nt, synthetic construct
  source 1..20: mol_type = other RNA
aggaaaataagcacaaatgt

SEQ ID NO: 3794 - RNA, 20 nt, synthetic construct
  source 1..20: mol_type = other RNA
aaggaaaataagcacaaatg

SEQ ID NO: 3795 - RNA, 20 nt, synthetic construct
  source 1..20: mol_type = other RNA
gaaggaaaataagcacaaat

SEQ ID NO: 3796 - RNA, 20 nt, synthetic construct
  source 1..20: mol_type = other RNA
ggaaggaaaataagcacaaa

SEQ ID NO: 3797 - RNA, 20 nt, synthetic construct
  source 1..20: mol_type = other RNA
aggaaggaaaataagcacaa

SEQ ID NO: 3798 - RNA, 20 nt, synthetic construct
  source 1..20: mol_type = other RNA
caggaaggaaaataagcaca

SEQ ID NO: 3799 - RNA, 20 nt, synthetic construct
  source 1..20: mol_type = other RNA
acaggaaggaaaataagcac

SEQ ID NO: 3800 - RNA, 20 nt, synthetic construct
  source 1..20: mol_type = other RNA
cacaggaaggaaaataagca

SEQ ID NO: 3801 - RNA, 20 nt, synthetic construct
  source 1..20: mol_type = other RNA
acacaggaaggaaaataagc

SEQ ID NO: 3802 - RNA, 20 nt, synthetic construct
  source 1..20: mol_type = other RNA
tacacaggaaggaaaataag

SEQ ID NO: 3803 - RNA, 20 nt, synthetic construct
  source 1..20: mol_type = other RNA
atacacaggaaggaaaataa

SEQ ID NO: 3804 - RNA, 20 nt, synthetic construct
  source 1..20: mol_type = other RNA
gatacacaggaaggaaaata

SEQ ID NO: 3805 - RNA, 20 nt, synthetic construct
  source 1..20: mol_type = other RNA
agatacacaggaaggaaaat

SEQ ID NO: 3806 - RNA, 20 nt, synthetic construct
  source 1..20: mol_type = other RNA
aagatacacaggaaggaaaa

SEQ ID NO: 3807 - RNA, 20 nt, synthetic construct
  source 1..20: mol_type = other RNA
caagatacacaggaaggaaa

SEQ ID NO: 3808 - RNA, 20 nt, synthetic construct
  source 1..20: mol_type = other RNA
tcaagatacacaggaaggaa

SEQ ID NO: 3809 - RNA, 20 nt, synthetic construct
  source 1..20: mol_type = other RNA
ctcaagatacacaggaagga

SEQ ID NO: 3810 - RNA, 20 nt, synthetic construct
  source 1..20: mol_type = other RNA
tctcaagatacacaggaagg

SEQ ID NO: 3811 - RNA, 20 nt, synthetic construct
  source 1..20: mol_type = other RNA
gtctcaagatacacaggaag

SEQ ID NO: 3812 - RNA, 20 nt, synthetic construct
  source 1..20: mol_type = other RNA
agtctcaagatacacaggaa

SEQ ID NO: 3813 - RNA, 20 nt, synthetic construct
  source 1..20: mol_type = other RNA
tagtctcaagatacacagga

SEQ ID NO: 3814 - RNA, 20 nt, synthetic construct
  source 1..20: mol_type = other RNA
ctagtctcaagatacacagg

SEQ ID NO: 3815 - RNA, 20 nt, synthetic construct
  source 1..20: mol_type = other RNA
cctagtctcaagatacacag

SEQ ID NO: 3816 - RNA, 20 nt, synthetic construct
  source 1..20: mol_type = other RNA
ccctagtctcaagatacaca

SEQ ID NO: 3817 - RNA, 20 nt, synthetic construct
  source 1..20: mol_type = other RNA
tccctagtctcaagatacac

SEQ ID NO: 3818 - RNA, 20 nt, synthetic construct
  source 1..20: mol_type = other RNA
ctccctagtctcaagataca

SEQ ID NO: 3819 - RNA, 20 nt, synthetic construct
  source 1..20: mol_type = other RNA
actccctagtctcaagatac

SEQ ID NO: 3820 - RNA, 20 nt, synthetic construct
  source 1..20: mol_type = other RNA
tactccctagtctcaagata

SEQ ID NO: 3821 - RNA, 20 nt, synthetic construct
  source 1..20: mol_type = other RNA
atactccctagtctcaagat

SEQ ID NO: 3822 - RNA, 20 nt, synthetic construct
  source 1..20: mol_type = other RNA
tatactccctagtctcaaga

SEQ ID NO: 3823 - RNA, 20 nt, synthetic construct
  source 1..20: mol_type = other RNA
ctatactccctagtctcaag

SEQ ID NO: 3824 - RNA, 20 nt, synthetic construct
  source 1..20: mol_type = other RNA
actatactccctagtctcaa

SEQ ID NO: 3825 - RNA, 20 nt, synthetic construct
  source 1..20: mol_type = other RNA
aactatactccctagtctca

SEQ ID NO: 3826 - RNA, 20 nt, synthetic construct
  source 1..20: mol_type = other RNA
aaactatactccctagtctc

SEQ ID NO: 3827 - RNA, 20 nt, synthetic construct
  source 1..20: mol_type = other RNA
taaactatactccctagtct

SEQ ID NO: 3828 - RNA, 20 nt, synthetic construct
  source 1..20: mol_type = other RNA
ataaactatactccctagtc

SEQ ID NO: 3829 - RNA, 20 nt, synthetic construct
  source 1..20: mol_type = other RNA
cataaactatactccctagt

SEQ ID NO: 3830 - RNA, 20 nt, synthetic construct
  source 1..20: mol_type = other RNA
gcataaactatactccctag

SEQ ID NO: 3831 - RNA, 20 nt, synthetic construct
  source 1..20: mol_type = other RNA
agcataaactatactcccta

SEQ ID NO: 3832 - RNA, 20 nt, synthetic construct
  source 1..20: mol_type = other RNA
aagcataaactatactccct

SEQ ID NO: 3833 - RNA, 20 nt, synthetic construct
  source 1..20: mol_type = other RNA
gaagcataaactatactccc

SEQ ID NO: 3834 - RNA, 20 nt, synthetic construct
  source 1..20: mol_type = other RNA
agaagcataaactatactcc

SEQ ID NO: 3835 - RNA, 20 nt, synthetic construct
  source 1..20: mol_type = other RNA
tagaagcataaactatactc

SEQ ID NO: 3836 - RNA, 20 nt, synthetic construct
  source 1..20: mol_type = other RNA
atagaagcataaactatact

SEQ ID NO: 3837 - RNA, 20 nt, synthetic construct
  source 1..20: mol_type = other RNA
aatagaagcataaactatac

SEQ ID NO: 3838 - RNA, 20 nt, synthetic construct
  source 1..20: mol_type = other RNA
caatagaagcataaactata

SEQ ID NO: 3839 - RNA, 20 nt, synthetic construct
  source 1..20: mol_type = other RNA
tcaatagaagcataaactat

SEQ ID NO: 3840 - RNA, 20 nt, synthetic construct
  source 1..20: mol_type = other RNA
ttcaatagaagcataaacta

SEQ ID NO: 3841 - RNA, 20 nt, synthetic construct
  source 1..20: mol_type = other RNA
tttcaatagaagcataaact

SEQ ID NO: 3842 - RNA, 20 nt, synthetic construct
  source 1..20: mol_type = other RNA
gtttcaatagaagcataaac

SEQ ID NO: 3843 - RNA, 20 nt, synthetic construct
  source 1..20: mol_type = other RNA
tgtttcaatagaagcataaa

SEQ ID NO: 3844 - RNA, 20 nt, synthetic construct
  source 1..20: mol_type = other RNA
gtgtttcaatagaagcataa

SEQ ID NO: 3845 - RNA, 20 nt, synthetic construct
  source 1..20: mol_type = other RNA
tgtgtttcaatagaagcata

SEQ ID NO: 3846 - RNA, 20 nt, synthetic construct
  source 1..20: mol_type = other RNA
gtgtgtttcaatagaagcat

SEQ ID NO: 3847 - RNA, 20 nt, synthetic construct
  source 1..20: mol_type = other RNA
tgtgtgtttcaatagaagca

SEQ ID NO: 3848 - RNA, 20 nt, synthetic construct
  source 1..20: mol_type = other RNA
gtgtgtgtttcaatagaagc

SEQ ID NO: 3849 - RNA, 20 nt, synthetic construct
  source 1..20: mol_type = other RNA
tgtgtgtgtttcaatagaag

SEQ ID NO: 3850 - RNA, 20 nt, synthetic construct
  source 1..20: mol_type = other RNA
gtgtgtgtgtttcaatagaa

SEQ ID NO: 3851 - RNA, 20 nt, synthetic construct
  source 1..20: mol_type = other RNA
tgtgtgtgtgtttcaataga

SEQ ID NO: 3852 - RNA, 20 nt, synthetic construct
  source 1..20: mol_type = other RNA
gtgtgtgtgtgtttcaatag

SEQ ID NO: 3853 - RNA, 20 nt, synthetic construct
  source 1..20: mol_type = other RNA
tgtgtgtgtgtgtttcaata

SEQ ID NO: 3854 - RNA, 20 nt, synthetic construct
  source 1..20: mol_type = other RNA
atgtgtgtgtgtgtttcaat

SEQ ID NO: 3855 - RNA, 20 nt, synthetic construct
  source 1..20: mol_type = other RNA
catgtgtgtgtgtgtttcaa

SEQ ID NO: 3856 - RNA, 20 nt, synthetic construct
  source 1..20: mol_type = other RNA
tcatgtgtgtgtgtgtttca

SEQ ID NO: 3857 - RNA, 20 nt, synthetic construct
  source 1..20: mol_type = other RNA
ttcatgtgtgtgtgtgtttc

SEQ ID NO: 3858 - RNA, 20 nt, synthetic construct
  source 1..20: mol_type = other RNA
tttcatgtgtgtgtgtgttt

SEQ ID NO: 3859 - RNA, 20 nt, synthetic construct
  source 1..20: mol_type = other RNA
gtttcatgtgtgtgtgtgtt

SEQ ID NO: 3860 - RNA, 20 nt, synthetic construct
  source 1..20: mol_type = other RNA
agtttcatgtgtgtgtgtgt

SEQ ID NO: 3861 - RNA, 20 nt, synthetic construct
  source 1..20: mol_type = other RNA
aagtttcatgtgtgtgtgtg

SEQ ID NO: 3862 - RNA, 20 nt, synthetic construct
  source 1..20: mol_type = other RNA
aaagtttcatgtgtgtgtgt

SEQ ID NO: 3863 - RNA, 20 nt, synthetic construct
  source 1..20: mol_type = other RNA
gaaagtttcatgtgtgtgtg

SEQ ID NO: 3864 - RNA, 20 nt, synthetic construct
  source 1..20: mol_type = other RNA
tgaaagtttcatgtgtgtgt

SEQ ID NO: 3865 - RNA, 20 nt, synthetic construct
  source 1..20: mol_type = other RNA
atgaaagtttcatgtgtgtg

SEQ ID NO: 3866 - RNA, 20 nt, synthetic construct
  source 1..20: mol_type = other RNA
catgaaagtttcatgtgtgt

SEQ ID NO: 3867 - RNA, 20 nt, synthetic construct
  source 1..20: mol_type = other RNA
tcatgaaagtttcatgtgtg

SEQ ID NO: 3868 - RNA, 20 nt, synthetic construct
  source 1..20: mol_type = other RNA
ttcatgaaagtttcatgtgt

SEQ ID NO: 3869 - RNA, 20 nt, synthetic construct
  source 1..20: mol_type = other RNA
tttcatgaaagtttcatgtg

SEQ ID NO: 3870 - RNA, 20 nt, synthetic construct
  source 1..20: mol_type = other RNA
atttcatgaaagtttcatgt

SEQ ID NO: 3871 - RNA, 20 nt, synthetic construct
  source 1..20: mol_type = other RNA
catttcatgaaagtttcatg

SEQ ID NO: 3872 - RNA, 20 nt, synthetic construct
  source 1..20: mol_type = other RNA
acatttcatgaaagtttcat

SEQ ID NO: 3873 - RNA, 20 nt, synthetic construct
  source 1..20: mol_type = other RNA
aacatttcatgaaagtttca

SEQ ID NO: 3874 - RNA, 20 nt, synthetic construct
  source 1..20: mol_type = other RNA
taacatttcatgaaagtttc

SEQ ID NO: 3875 - RNA, 20 nt, synthetic construct
  source 1..20: mol_type = other RNA
ctaacatttcatgaaagttt

SEQ ID NO: 3876 - RNA, 20 nt, synthetic construct
  source 1..20: mol_type = other RNA
cctaacatttcatgaaagtt

SEQ ID NO: 3877 - RNA, 20 nt, synthetic construct
  source 1..20: mol_type = other RNA
acctaacatttcatgaaagt

SEQ ID NO: 3878 - RNA, 20 nt, synthetic construct
  source 1..20: mol_type = other RNA
cacctaacatttcatgaaag

SEQ ID NO: 3879 - RNA, 20 nt, synthetic construct
  source 1..20: mol_type = other RNA
tcacctaacatttcatgaaa

SEQ ID NO: 3880 - RNA, 20 nt, synthetic construct
  source 1..20: mol_type = other RNA
ttcacctaacatttcatgaa

SEQ ID NO: 3881 - RNA, 20 nt, synthetic construct
  source 1..20: mol_type = other RNA
attcacctaacatttcatga

SEQ ID NO: 3882 - RNA, 20 nt, synthetic construct
  source 1..20: mol_type = other RNA
gattcacctaacatttcatg

SEQ ID NO: 3883 - RNA, 20 nt, synthetic construct
  source 1..20: mol_type = other RNA
cgattcacctaacatttcat

SEQ ID NO: 3884 - RNA, 20 nt, synthetic construct
  source 1..20: mol_type = other RNA
tcgattcacctaacatttca

SEQ ID NO: 3885 - RNA, 20 nt, synthetic construct
  source 1..20: mol_type = other RNA
atcgattcacctaacatttc

SEQ ID NO: 3886 - RNA, 20 nt, synthetic construct
  source 1..20: mol_type = other RNA
gatcgattcacctaacattt

SEQ ID NO: 3887 - RNA, 20 nt, synthetic construct
  source 1..20: mol_type = other RNA
tgatcgattcacctaacatt

SEQ ID NO: 3888 - RNA, 20 nt, synthetic construct
  source 1..20: mol_type = other RNA
ttgatcgattcacctaacat

SEQ ID NO: 3889 - RNA, 20 nt, synthetic construct
  source 1..20: mol_type = other RNA
attgatcgattcacctaaca

SEQ ID NO: 3890 - RNA, 20 nt, synthetic construct
  source 1..20: mol_type = other RNA
tattgatcgattcacctaac

SEQ ID NO: 3891 - RNA, 20 nt, synthetic construct
  source 1..20: mol_type = other RNA
ttattgatcgattcacctaa

SEQ ID NO: 3892 - RNA, 20 nt, synthetic construct
  source 1..20: mol_type = other RNA
gttattgatcgattcaccta

SEQ ID NO: 3893 - RNA, 20 nt, synthetic construct
  source 1..20: mol_type = other RNA
ggttattgatcgattcacct

SEQ ID NO: 3894 - RNA, 20 nt, synthetic construct
  source 1..20: mol_type = other RNA
aggttattgatcgattcacc

SEQ ID NO: 3895 - RNA, 20 nt, synthetic construct
  source 1..20: mol_type = other RNA
taggttattgatcgattcac

SEQ ID NO: 3896 - RNA, 20 nt, synthetic construct
  source 1..20: mol_type = other RNA
gtaggttattgatcgattca

SEQ ID NO: 3897 - RNA, 20 nt, synthetic construct
  source 1..20: mol_type = other RNA
agtaggttattgatcgattc

SEQ ID NO: 3898 - RNA, 20 nt, synthetic construct
  source 1..20: mol_type = other RNA
tagtaggttattgatcgatt

SEQ ID NO: 3899 - RNA, 20 nt, synthetic construct
  source 1..20: mol_type = other RNA
ttagtaggttattgatcgat

SEQ ID NO: 3900 - RNA, 20 nt, synthetic construct
  source 1..20: mol_type = other RNA
attagtaggttattgatcga

SEQ ID NO: 3901 - RNA, 20 nt, synthetic construct
  source 1..20: mol_type = other RNA
aattagtaggttattgatcg

SEQ ID NO: 3902 - RNA, 20 nt, synthetic construct
  source 1..20: mol_type = other RNA
taattagtaggttattgatc

SEQ ID NO: 3903 - RNA, 20 nt, synthetic construct
  source 1..20: mol_type = other RNA
gtaattagtaggttattgat

SEQ ID NO: 3904 - RNA, 20 nt, synthetic construct
  source 1..20: mol_type = other RNA
tgtaattagtaggttattga

SEQ ID NO: 3905 - RNA, 20 nt, synthetic construct
  source 1..20: mol_type = other RNA
ttgtaattagtaggttattg

SEQ ID NO: 3906 - RNA, 20 nt, synthetic construct
  source 1..20: mol_type = other RNA
gttgtaattagtaggttatt

SEQ ID NO: 3907 - RNA, 20 nt, synthetic construct
  source 1..20: mol_type = other RNA
ggttgtaattagtaggttat

SEQ ID NO: 3908 - RNA, 20 nt, synthetic construct
  source 1..20: mol_type = other RNA
tggttgtaattagtaggtta

SEQ ID NO: 3909 - RNA, 20 nt, synthetic construct
  source 1..20: mol_type = other RNA
gtggttgtaattagtaggtt

SEQ ID NO: 3910 - RNA, 20 nt, synthetic construct
  source 1..20: mol_type = other RNA
ggtggttgtaattagtaggt

SEQ ID NO: 3911 - RNA, 20 nt, synthetic construct
  source 1..20: mol_type = other RNA
gggtggttgtaattagtagg

SEQ ID NO: 3912 - RNA, 20 nt, synthetic construct
  source 1..20: mol_type = other RNA
tgggtggttgtaattagtag

SEQ ID NO: 3913 - RNA, 20 nt, synthetic construct
  source 1..20: mol_type = other RNA
ctgggtggttgtaattagta

SEQ ID NO: 3914 - RNA, 20 nt, synthetic construct
  source 1..20: mol_type = other RNA
tctgggtggttgtaattagt

SEQ ID NO: 3915 - RNA, 20 nt, synthetic construct
  source 1..20: mol_type = other RNA
ttctgggtggttgtaattag

SEQ ID NO: 3916 - RNA, 20 nt, synthetic construct
  source 1..20: mol_type = other RNA
gttctgggtggttgtaatta

SEQ ID NO: 3917 - RNA, 20 nt, synthetic construct
  source 1..20: mol_type = other RNA
ggttctgggtggttgtaatt

SEQ ID NO: 3918 - RNA, 20 nt, synthetic construct
  source 1..20: mol_type = other RNA
tggttctgggtggttgtaat

SEQ ID NO: 3919 - RNA, 20 nt, synthetic construct
  source 1..20: mol_type = other RNA
ctggttctgggtggttgtaa

SEQ ID NO: 3920 - RNA, 20 nt, synthetic construct
  source 1..20: mol_type = other RNA
tctggttctgggtggttgta

SEQ ID NO: 3921 - RNA, 20 nt, synthetic construct
  source 1..20: mol_type = other RNA
ttctggttctgggtggttgt

SEQ ID NO: 3922 - RNA, 20 nt, synthetic construct
  source 1..20: mol_type = other RNA
tttctggttctgggtggttg

SEQ ID NO: 3923 - RNA, 20 nt, synthetic construct
  source 1..20: mol_type = other RNA
ttttctggttctgggtggtt

SEQ ID NO: 3924 - RNA, 20 nt, synthetic construct
  source 1..20: mol_type = other RNA
tttttctggttctgggtggt

SEQ ID NO: 3925 - RNA, 20 nt, synthetic construct
  source 1..20: mol_type = other RNA
ttttttctggttctgggtgg

SEQ ID NO: 3926 - RNA, 20 nt, synthetic construct
  source 1..20: mol_type = other RNA
tttttttctggttctgggtg

SEQ ID NO: 3927 - RNA, 20 nt, synthetic construct
  source 1..20: mol_type = other RNA
atttttttctggttctgggt

SEQ ID NO: 3928 - RNA, 20 nt, synthetic construct
  source 1..20: mol_type = other RNA
tatttttttctggttctggg

SEQ ID NO: 3929 - RNA, 20 nt, synthetic construct
  source 1..20: mol_type = other RNA
gtatttttttctggttctgg

SEQ ID NO: 3930 - RNA, 20 nt, synthetic construct
  source 1..20: mol_type = other RNA
tgtatttttttctggttctg

SEQ ID NO: 3931 - RNA, 20 nt, synthetic construct
  source 1..20: mol_type = other RNA
ctgtatttttttctggttct

SEQ ID NO: 3932 - RNA, 20 nt, synthetic construct
  source 1..20: mol_type = other RNA
cctgtatttttttctggttc

SEQ ID NO: 3933 - RNA, 20 nt, synthetic construct
  source 1..20: mol_type = other RNA
acctgtatttttttctggtt

SEQ ID NO: 3934 - RNA, 20 nt, synthetic construct
  source 1..20: mol_type = other RNA
tacctgtatttttttctggt

SEQ ID NO: 3935 - RNA, 20 nt, synthetic construct
  source 1..20: mol_type = other RNA
ctacctgtatttttttctgg

SEQ ID NO: 3936 - RNA, 20 nt, synthetic construct
  source 1..20: mol_type = other RNA
tctacctgtatttttttctg

SEQ ID NO: 3937 - RNA, 20 nt, synthetic construct
  source 1..20: mol_type = other RNA
ttctacctgtatttttttct

SEQ ID NO: 3938 - RNA, 20 nt, synthetic construct
  source 1..20: mol_type = other RNA
cttctacctgtatttttttc

SEQ ID NO: 3939 - RNA, 20 nt, synthetic construct
  source 1..20: mol_type = other RNA
tcttctacctgtattttttt

SEQ ID NO: 3940 - RNA, 20 nt, synthetic construct
  source 1..20: mol_type = other RNA
ttcttctacctgtatttttt

SEQ ID NO: 3941 - RNA, 20 nt, synthetic construct
  source 1..20: mol_type = other RNA
tttcttctacctgtattttt

SEQ ID NO: 3942 - RNA, 20 nt, synthetic construct
  source 1..20: mol_type = other RNA
ttttcttctacctgtatttt

SEQ ID NO: 3943 - RNA, 20 nt, synthetic construct
  source 1..20: mol_type = other RNA
tttttcttctacctgtattt

SEQ ID NO: 3944 - RNA, 20 nt, synthetic construct
  source 1..20: mol_type = other RNA
ttttttcttctacctgtatt

SEQ ID NO: 3945 - RNA, 20 nt, synthetic construct
  source 1..20: mol_type = other RNA
tttttttcttctacctgtat

SEQ ID NO: 3946 - RNA, 20 nt, synthetic construct
  source 1..20: mol_type = other RNA
ttttttttcttctacctgta

SEQ ID NO: 3947 - RNA, 20 nt, synthetic construct
  source 1..20: mol_type = other RNA
gttttttttcttctacctgt

SEQ ID NO: 3948 - RNA, 20 nt, synthetic construct
  source 1..20: mol_type = other RNA
ggttttttttcttctacctg

SEQ ID NO: 3949 - RNA, 20 nt, synthetic construct
  source 1..20: mol_type = other RNA
aggttttttttcttctacct

SEQ ID NO: 3950 - RNA, 20 nt, synthetic construct
  source 1..20: mol_type = other RNA
taggttttttttcttctacc

SEQ ID NO: 3951 - RNA, 20 nt, synthetic construct
  source 1..20: mol_type = other RNA
ttaggttttttttcttctac

SEQ ID NO: 3952 - RNA, 20 nt, synthetic construct
  source 1..20: mol_type = other RNA
tttaggttttttttcttcta

SEQ ID NO: 3953 - RNA, 20 nt, synthetic construct
  source 1..20: mol_type = other RNA
gtttaggttttttttcttct

SEQ ID NO: 3954 - RNA, 20 nt, synthetic construct
  source 1..20: mol_type = other RNA
tgtttaggttttttttcttc

SEQ ID NO: 3955 - RNA, 20 nt, synthetic construct
  source 1..20: mol_type = other RNA
ctgtttaggttttttttctt

SEQ ID NO: 3956 - RNA, 20 nt, synthetic construct
  source 1..20: mol_type = other RNA
tctgtttaggttttttttct

SEQ ID NO: 3957 - RNA, 20 nt, synthetic construct
  source 1..20: mol_type = other RNA
gtctgtttaggttttttttc

SEQ ID NO: 3958 - RNA, 20 nt, synthetic construct
  source 1..20: mol_type = other RNA
agtctgtttaggtttttttt

SEQ ID NO: 3959 - RNA, 20 nt, synthetic construct
  source 1..20: mol_type = other RNA
cagtctgtttaggttttttt

SEQ ID NO: 3960 - RNA, 20 nt, synthetic construct
  source 1..20: mol_type = other RNA
tcagtctgtttaggtttttt

SEQ ID NO: 3961 - RNA, 20 nt, synthetic construct
  source 1..20: mol_type = other RNA
ttcagtctgtttaggttttt

SEQ ID NO: 3962 - RNA, 20 nt, synthetic construct
  source 1..20: mol_type = other RNA
tttcagtctgtttaggtttt

SEQ ID NO: 3963 - RNA, 20 nt, synthetic construct
  source 1..20: mol_type = other RNA
gtttcagtctgtttaggttt

SEQ ID NO: 3964 - RNA, 20 nt, synthetic construct
  source 1..20: mol_type = other RNA
tgtttcagtctgtttaggtt

SEQ ID NO: 3965 - RNA, 20 nt, synthetic construct
  source 1..20: mol_type = other RNA
ttgtttcagtctgtttaggt

SEQ ID NO: 3966 - RNA, 20 nt, synthetic construct
  source 1..20: mol_type = other RNA
tttgtttcagtctgtttagg

SEQ ID NO: 3967 - RNA, 20 nt, synthetic construct
  source 1..20: mol_type = other RNA
atttgtttcagtctgtttag

SEQ ID NO: 3968 - RNA, 20 nt, synthetic construct
  source 1..20: mol_type = other RNA
tatttgtttcagtctgttta

SEQ ID NO: 3969 - RNA, 20 nt, synthetic construct
  source 1..20: mol_type = other RNA
atatttgtttcagtctgttt

SEQ ID NO: 3970 - RNA, 20 nt, synthetic construct
  source 1..20: mol_type = other RNA
gatatttgtttcagtctgtt

SEQ ID NO: 3971 - RNA, 20 nt, synthetic construct
  source 1..20: mol_type = other RNA
tgatatttgtttcagtctgt

SEQ ID NO: 3972 - RNA, 20 nt, synthetic construct
  source 1..20: mol_type = other RNA
gtgatatttgtttcagtctg

SEQ ID NO: 3973 - RNA, 20 nt, synthetic construct
  source 1..20: mol_type = other RNA
tgtgatatttgtttcagtct

SEQ ID NO: 3974 - RNA, 20 nt, synthetic construct
  source 1..20: mol_type = other RNA
ttgtgatatttgtttcagtc

SEQ ID NO: 3975 - RNA, 20 nt, synthetic construct
  source 1..20: mol_type = other RNA
tttgtgatatttgtttcagt

SEQ ID NO: 3976 - RNA, 20 nt, synthetic construct
  source 1..20: mol_type = other RNA
ctttgtgatatttgtttcag

SEQ ID NO: 3977 - RNA, 20 nt, synthetic construct
  source 1..20: mol_type = other RNA
actttgtgatatttgtttca

SEQ ID NO: 3978 - RNA, 20 nt, synthetic construct
  source 1..20: mol_type = other RNA
gactttgtgatatttgtttc

SEQ ID NO: 3979 - RNA, 20 nt, synthetic construct
  source 1..20: mol_type = other RNA
agactttgtgatatttgttt

SEQ ID NO: 3980 - RNA, 20 nt, synthetic construct
  source 1..20: mol_type = other RNA
tagactttgtgatatttgtt

SEQ ID NO: 3981 - RNA, 20 nt, synthetic construct
  source 1..20: mol_type = other RNA
ttagactttgtgatatttgt

SEQ ID NO: 3982 - RNA, 20 nt, synthetic construct
  source 1..20: mol_type = other RNA
attagactttgtgatatttg

SEQ ID NO: 3983 - RNA, 20 nt, synthetic construct
  source 1..20: mol_type = other RNA
gattagactttgtgatattt

SEQ ID NO: 3984 - RNA, 20 nt, synthetic construct
  source 1..20: mol_type = other RNA
cgattagactttgtgatatt

SEQ ID NO: 3985 - RNA, 20 nt, synthetic construct
  source 1..20: mol_type = other RNA
acgattagactttgtgatat

SEQ ID NO: 3986 - RNA, 20 nt, synthetic construct
  source 1..20: mol_type = other RNA
gacgattagactttgtgata

SEQ ID NO: 3987 - RNA, 20 nt, synthetic construct
  source 1..20: mol_type = other RNA
tgacgattagactttgtgat

SEQ ID NO: 3988 - RNA, 20 nt, synthetic construct
  source 1..20: mol_type = other RNA
ttgacgattagactttgtga

SEQ ID NO: 3989 - RNA, 20 nt, synthetic construct
  source 1..20: mol_type = other RNA
tttgacgattagactttgtg

SEQ ID NO: 3990 - RNA, 20 nt, synthetic construct
  source 1..20: mol_type = other RNA
ctttgacgattagactttgt

SEQ ID NO: 3991 - RNA, 20 nt, synthetic construct
  source 1..20: mol_type = other RNA
gctttgacgattagactttg

SEQ ID NO: 3992 - RNA, 20 nt, synthetic construct
  source 1..20: mol_type = other RNA
ggctttgacgattagacttt

SEQ ID NO: 3993 - RNA, 20 nt, synthetic construct
  source 1..20: mol_type = other RNA
cggctttgacgattagactt

SEQ ID NO: 3994 - RNA, 20 nt, synthetic construct
  source 1..20: mol_type = other RNA
acggctttgacgattagact

SEQ ID NO: 3995 - RNA, 20 nt, synthetic construct
  source 1..20: mol_type = other RNA
cacggctttgacgattagac

SEQ ID NO: 3996 - RNA, 20 nt, synthetic construct
  source 1..20: mol_type = other RNA
tcacggctttgacgattaga

SEQ ID NO: 3997 - RNA, 20 nt, synthetic construct
  source 1..20: mol_type = other RNA
atcacggctttgacgattag

SEQ ID NO: 3998 - RNA, 20 nt, synthetic construct
  source 1..20: mol_type = other RNA
aatcacggctttgacgatta

SEQ ID NO: 3999 - RNA, 20 nt, synthetic construct
  source 1..20: mol_type = other RNA
gaatcacggctttgacgatt

SEQ ID NO: 4000 - RNA, 20 nt, synthetic construct
  source 1..20: mol_type = other RNA
agaatcacggctttgacgat

SEQ ID NO: 4001 - RNA, 20 nt, synthetic construct
  source 1..20: mol_type = other RNA
aagaatcacggctttgacga

SEQ ID NO: 4002 - RNA, 20 nt, synthetic construct
  source 1..20: mol_type = other RNA
caagaatcacggctttgacg

SEQ ID NO: 4003 - RNA, 20 nt, synthetic construct
  source 1..20: mol_type = other RNA
tcaagaatcacggctttgac

SEQ ID NO: 4004 - RNA, 20 nt, synthetic construct
  source 1..20: mol_type = other RNA
ctcaagaatcacggctttga

SEQ ID NO: 4005 - RNA, 20 nt, synthetic construct
  source 1..20: mol_type = other RNA
gctcaagaatcacggctttg

SEQ ID NO: 4006 - RNA, 20 nt, synthetic construct
  source 1..20: mol_type = other RNA
tgctcaagaatcacggcttt

SEQ ID NO: 4007 - RNA, 20 nt, synthetic construct
  source 1..20: mol_type = other RNA
ctgctcaagaatcacggctt

SEQ ID NO: 4008 - RNA, 20 nt, synthetic construct
  source 1..20: mol_type = other RNA
gctgctcaagaatcacggct

SEQ ID NO: 4009 - RNA, 20 nt, synthetic construct
  source 1..20: mol_type = other RNA
cgctgctcaagaatcacggc

SEQ ID NO: 4010 - RNA, 20 nt, synthetic construct
  source 1..20: mol_type = other RNA
ccgctgctcaagaatcacgg

SEQ ID NO: 4011 - RNA, 20 nt, synthetic construct
  source 1..20: mol_type = other RNA
gccgctgctcaagaatcacg

SEQ ID NO: 4012 - RNA, 20 nt, synthetic construct
  source 1..20: mol_type = other RNA
tgccgctgctcaagaatcac

SEQ ID NO: 4013 - RNA, 20 nt, synthetic construct
  source 1..20: mol_type = other RNA
ttgccgctgctcaagaatca

SEQ ID NO: 4014 - RNA, 20 nt, synthetic construct
  source 1..20: mol_type = other RNA
attgccgctgctcaagaatc

SEQ ID NO: 4015 - RNA, 20 nt, synthetic construct
  source 1..20: mol_type = other RNA
aattgccgctgctcaagaat

SEQ ID NO: 4016 - RNA, 20 nt, synthetic construct
  source 1..20: mol_type = other RNA
aaattgccgctgctcaagaa

SEQ ID NO: 4017 - RNA, 20 nt, synthetic construct
  source 1..20: mol_type = other RNA
aaaattgccgctgctcaaga

SEQ ID NO: 4018 - RNA, 20 nt, synthetic construct
  source 1..20: mol_type = other RNA
caaaattgccgctgctcaag

SEQ ID NO: 4019 - RNA, 20 nt, synthetic construct
  source 1..20: mol_type = other RNA
gcaaaattgccgctgctcaa

SEQ ID NO: 4020 - RNA, 20 nt, synthetic construct
  source 1..20: mol_type = other RNA
ggcaaaattgccgctgctca

SEQ ID NO: 4021 - RNA, 20 nt, synthetic construct
  source 1..20: mol_type = other RNA
cggcaaaattgccgctgctc

SEQ ID NO: 4022 - RNA, 20 nt, synthetic construct
  source 1..20: mol_type = other RNA
ccggcaaaattgccgctgct

SEQ ID NO: 4023 - RNA, 20 nt, synthetic construct
  source 1..20: mol_type = other RNA
gccggcaaaattgccgctgc

SEQ ID NO: 4024 - RNA, 20 nt, synthetic construct
  source 1..20: mol_type = other RNA
ggccggcaaaattgccgctg

SEQ ID NO: 4025 - RNA, 20 nt, synthetic construct
  source 1..20: mol_type = other RNA
tggccggcaaaattgccgct

SEQ ID NO: 4026 - RNA, 20 nt, synthetic construct
  source 1..20: mol_type = other RNA
ctggccggcaaaattgccgc

SEQ ID NO: 4027 - RNA, 20 nt, synthetic construct
  source 1..20: mol_type = other RNA
cctggccggcaaaattgccg

SEQ ID NO: 4028 - RNA, 20 nt, synthetic construct
  source 1..20: mol_type = other RNA
ccctggccggcaaaattgcc

SEQ ID NO: 4029 - RNA, 20 nt, synthetic construct
  source 1..20: mol_type = other RNA
tccctggccggcaaaattgc

SEQ ID NO: 4030 - RNA, 20 nt, synthetic construct
  source 1..20: mol_type = other RNA
gtccctggccggcaaaattg

SEQ ID NO: 4031 - RNA, 20 nt, synthetic construct
  source 1..20: mol_type = other RNA
tgtccctggccggcaaaatt

SEQ ID NO: 4032 - RNA, 20 nt, synthetic construct
  source 1..20: mol_type = other RNA
atgtccctggccggcaaaat

SEQ ID NO: 4033 - RNA, 20 nt, synthetic construct
  source 1..20: mol_type = other RNA
aatgtccctggccggcaaaa

SEQ ID NO: 4034 - RNA, 20 nt, synthetic construct
  source 1..20: mol_type = other RNA
aaatgtccctggccggcaaa

SEQ ID NO: 4035 - RNA, 20 nt, synthetic construct
  source 1..20: mol_type = other RNA
taaatgtccctggccggcaa

SEQ ID NO: 4036 - RNA, 20 nt, synthetic construct
  source 1..20: mol_type = other RNA
ctaaatgtccctggccggca

SEQ ID NO: 4037 - RNA, 20 nt, synthetic construct
  source 1..20: mol_type = other RNA
cctaaatgtccctggccggc

SEQ ID NO: 4038 - RNA, 20 nt, synthetic construct
  source 1..20: mol_type = other RNA
tcctaaatgtccctggccgg

SEQ ID NO: 4039 - RNA, 20 nt, synthetic construct
  source 1..20: mol_type = other RNA
ctcctaaatgtccctggccg

SEQ ID NO: 4040 - RNA, 20 nt, synthetic construct
  source 1..20: mol_type = other RNA
actcctaaatgtccctggcc

SEQ ID NO: 4041 - RNA, 20 nt, synthetic construct
  source 1..20: mol_type = other RNA
cactcctaaatgtccctggc

SEQ ID NO: 4042 - RNA, 20 nt, synthetic construct
  source 1..20: mol_type = other RNA
acactcctaaatgtccctgg

SEQ ID NO: 4043 - RNA, 20 nt, synthetic construct
  source 1..20: mol_type = other RNA
gacactcctaaatgtccctg

SEQ ID NO: 4044 - RNA, 20 nt, synthetic construct
  source 1..20: mol_type = other RNA
agacactcctaaatgtccct

SEQ ID NO: 4045 - RNA, 20 nt, synthetic construct
  source 1..20: mol_type = other RNA
cagacactcctaaatgtccc

SEQ ID NO: 4046 - RNA, 20 nt, synthetic construct
  source 1..20: mol_type = other RNA
ccagacactcctaaatgtcc

SEQ ID NO: 4047 - RNA, 20 nt, synthetic construct
  source 1..20: mol_type = other RNA
tccagacactcctaaatgtc

SEQ ID NO: 4048 - RNA, 20 nt, synthetic construct
  source 1..20: mol_type = other RNA
ctccagacactcctaaatgt

SEQ ID NO: 4049 - RNA, 20 nt, synthetic construct
  source 1..20: mol_type = other RNA
tctccagacactcctaaatg

SEQ ID NO: 4050 - RNA, 20 nt, synthetic construct
  source 1..20: mol_type = other RNA
gtctccagacactcctaaat

SEQ ID NO: 4051 - RNA, 20 nt, synthetic construct
  source 1..20: mol_type = other RNA
tgtctccagacactcctaaa

SEQ ID NO: 4052 - RNA, 20 nt, synthetic construct
  source 1..20: mol_type = other RNA
ttgtctccagacactcctaa

SEQ ID NO: 4053 - RNA, 20 nt, synthetic construct
  source 1..20: mol_type = other RNA
attgtctccagacactccta

SEQ ID NO: 4054 - RNA, 20 nt, synthetic construct
  source 1..20: mol_type = other RNA
gattgtctccagacactcct

SEQ ID NO: 4055 - RNA, 20 nt, synthetic construct
  source 1..20: mol_type = other RNA
agattgtctccagacactcc

SEQ ID NO: 4056 - RNA, 20 nt, synthetic construct
  source 1..20: mol_type = other RNA
cagattgtctccagacactc

SEQ ID NO: 4057 - RNA, 20 nt, synthetic construct
  source 1..20: mol_type = other RNA
ccagattgtctccagacact

SEQ ID NO: 4058 - RNA, 20 nt, synthetic construct
  source 1..20: mol_type = other RNA
cccagattgtctccagacac

SEQ ID NO: 4059 - RNA, 20 nt, synthetic construct
  source 1..20: mol_type = other RNA
acccagattgtctccagaca

SEQ ID NO: 4060 - RNA, 20 nt, synthetic construct
  source 1..20: mol_type = other RNA
aacccagattgtctccagac

SEQ ID NO: 4061 - RNA, 20 nt, synthetic construct
  source 1..20: mol_type = other RNA
caacccagattgtctccaga

SEQ ID NO: 4062 - RNA, 20 nt, synthetic construct
  source 1..20: mol_type = other RNA
acaacccagattgtctccag

SEQ ID NO: 4063 - RNA, 20 nt, synthetic construct
  source 1..20: mol_type = other RNA
gacaacccagattgtctcca

SEQ ID NO: 4064 - RNA, 20 nt, synthetic construct
  source 1..20: mol_type = other RNA
tgacaacccagattgtctcc

SEQ ID NO: 4065 - RNA, 20 nt, synthetic construct
  source 1..20: mol_type = other RNA
gtgacaacccagattgtctc

SEQ ID NO: 4066 - RNA, 20 nt, synthetic construct
  source 1..20: mol_type = other RNA
tgtgacaacccagattgtct

SEQ ID NO: 4067 - RNA, 20 nt, synthetic construct
  source 1..20: mol_type = other RNA
ttgtgacaacccagattgtc

SEQ ID NO: 4068 - RNA, 20 nt, synthetic construct
  source 1..20: mol_type = other RNA
gttgtgacaacccagattgt

SEQ ID NO: 4069 - RNA, 20 nt, synthetic construct
  source 1..20: mol_type = other RNA
agttgtgacaacccagattg

SEQ ID NO: 4070 - RNA, 20 nt, synthetic construct
  source 1..20: mol_type = other RNA
gagttgtgacaacccagatt

SEQ ID NO: 4071 - RNA, 20 nt, synthetic construct
  source 1..20: mol_type = other RNA
tgagttgtgacaacccagat

SEQ ID NO: 4072 - RNA, 20 nt, synthetic construct
  source 1..20: mol_type = other RNA
ctgagttgtgacaacccaga

SEQ ID NO: 4073 - RNA, 20 nt, synthetic construct
  source 1..20: mol_type = other RNA
cctgagttgtgacaacccag

SEQ ID NO: 4074 - RNA, 20 nt, synthetic construct
  source 1..20: mol_type = other RNA
ccctgagttgtgacaaccca

SEQ ID NO: 4075 - RNA, 20 nt, synthetic construct
  source 1..20: mol_type = other RNA
accctgagttgtgacaaccc

SEQ ID NO: 4076 - RNA, 20 nt, synthetic construct
  source 1..20: mol_type = other RNA
caccctgagttgtgacaacc

SEQ ID NO: 4077 - RNA, 20 nt, synthetic construct
  source 1..20: mol_type = other RNA
ccaccctgagttgtgacaac

SEQ ID NO: 4078 - RNA, 20 nt, synthetic construct
  source 1..20: mol_type = other RNA
tccaccctgagttgtgacaa

SEQ ID NO: 4079 - RNA, 20 nt, synthetic construct
  source 1..20: mol_type = other RNA
ctccaccctgagttgtgaca

SEQ ID NO: 4080 - RNA, 20 nt, synthetic construct
  source 1..20: mol_type = other RNA
cctccaccctgagttgtgac

SEQ ID NO: 4081 - RNA, 20 nt, synthetic construct
  source 1..20: mol_type = other RNA
ccctccaccctgagttgtga

SEQ ID NO: 4082 - RNA, 20 nt, synthetic construct
  source 1..20: mol_type = other RNA
tccctccaccctgagttgtg

SEQ ID NO: 4083 - RNA, 20 nt, synthetic construct
  source 1..20: mol_type = other RNA
gtccctccaccctgagttgt

SEQ ID NO: 4084 - RNA, 20 nt, synthetic construct
  source 1..20: mol_type = other RNA
tgtccctccaccctgagttg

SEQ ID NO: 4085 - RNA, 20 nt, synthetic construct
  source 1..20: mol_type = other RNA
gtgtccctccaccctgagtt

SEQ ID NO: 4086 - RNA, 20 nt, synthetic construct
  source 1..20: mol_type = other RNA
agtgtccctccaccctgagt

SEQ ID NO: 4087 - RNA, 20 nt, synthetic construct
  source 1..20: mol_type = other RNA
cagtgtccctccaccctgag

SEQ ID NO: 4088 - RNA, 20 nt, synthetic construct
  source 1..20: mol_type = other RNA
ccagtgtccctccaccctga

SEQ ID NO: 4089 - RNA, 20 nt, synthetic construct
  source 1..20: mol_type = other RNA
gccagtgtccctccaccctg

SEQ ID NO: 4090 - RNA, 20 nt, synthetic construct
  source 1..20: mol_type = other RNA
tgccagtgtccctccaccct

SEQ ID NO: 4091 - RNA, 20 nt, synthetic construct
  source 1..20: mol_type = other RNA
atgccagtgtccctccaccc

SEQ ID NO: 4092 - RNA, 20 nt, synthetic construct
  source 1..20: mol_type = other RNA
gatgccagtgtccctccacc

SEQ ID NO: 4093 - RNA, 20 nt, synthetic construct
  source 1..20: mol_type = other RNA
agatgccagtgtccctccac

SEQ ID NO: 4094 - RNA, 20 nt, synthetic construct
  source 1..20: mol_type = other RNA
cagatgccagtgtccctcca

SEQ ID NO: 4095 - RNA, 20 nt, synthetic construct
  source 1..20: mol_type = other RNA
ccagatgccagtgtccctcc

SEQ ID NO: 4096 - RNA, 20 nt, synthetic construct
  source 1..20: mol_type = other RNA
accagatgccagtgtccctc

SEQ ID NO: 4097 - RNA, 20 nt, synthetic construct
  source 1..20: mol_type = other RNA
taccagatgccagtgtccct

SEQ ID NO: 4098 - RNA, 20 nt, synthetic construct
  source 1..20: mol_type = other RNA
ctaccagatgccagtgtccc

SEQ ID NO: 4099 - RNA, 20 nt, synthetic construct
  source 1..20: mol_type = other RNA
cctaccagatgccagtgtcc

SEQ ID NO: 4100 - RNA, 20 nt, synthetic construct
  source 1..20: mol_type = other RNA
acctaccagatgccagtgtc

SEQ ID NO: 4101 - RNA, 20 nt, synthetic construct
  source 1..20: mol_type = other RNA
tacctaccagatgccagtgt

SEQ ID NO: 4102 - RNA, 20 nt, synthetic construct
  source 1..20: mol_type = other RNA
ttacctaccagatgccagtg

SEQ ID NO: 4103 - RNA, 20 nt, synthetic construct
  source 1..20: mol_type = other RNA
cttacctaccagatgccagt

SEQ ID NO: 4104 - RNA, 20 nt, synthetic construct
  source 1..20: mol_type = other RNA
ccttacctaccagatgccag

SEQ ID NO: 4105 - RNA, 20 nt, synthetic construct
  source 1..20: mol_type = other RNA
cccttacctaccagatgcca

SEQ ID NO: 4106 - RNA, 20 nt, synthetic construct
  source 1..20: mol_type = other RNA
gcccttacctaccagatgcc

SEQ ID NO: 4107 - RNA, 20 nt, synthetic construct
  source 1..20: mol_type = other RNA
ggcccttacctaccagatgc

SEQ ID NO: 4108 - RNA, 20 nt, synthetic construct
  source 1..20: mol_type = other RNA
tggcccttacctaccagatg

SEQ ID NO: 4109 - RNA, 20 nt, synthetic construct
  source 1..20: mol_type = other RNA
ctggcccttacctaccagat

SEQ ID NO: 4110 - RNA, 20 nt, synthetic construct
  source 1..20: mol_type = other RNA
gctggcccttacctaccaga

SEQ ID NO: 4111 - RNA, 20 nt, synthetic construct
  source 1..20: mol_type = other RNA
tgctggcccttacctaccag

SEQ ID NO: 4112 - RNA, 20 nt, synthetic construct
  source 1..20: mol_type = other RNA
ttgctggcccttacctacca

SEQ ID NO: 4113 - RNA, 20 nt, synthetic construct
  source 1..20: mol_type = other RNA
attgctggcccttacctacc

SEQ ID NO: 4114 - RNA, 20 nt, synthetic construct
  source 1..20: mol_type = other RNA
gattgctggcccttacctac

SEQ ID NO: 4115 - RNA, 20 nt, synthetic construct
  source 1..20: mol_type = other RNA
ggattgctggcccttaccta

SEQ ID NO: 4116 - RNA, 20 nt, synthetic construct
  source 1..20: mol_type = other RNA
gggattgctggcccttacct

SEQ ID NO: 4117 - RNA, 20 nt, synthetic construct
  source 1..20: mol_type = other RNA
tgggattgctggcccttacc

SEQ ID NO: 4118 - RNA, 20 nt, synthetic construct
  source 1..20: mol_type = other RNA
gtgggattgctggcccttac

SEQ ID NO: 4119 - RNA, 20 nt, synthetic construct
  source 1..20: mol_type = other RNA
agtgggattgctggccctta

SEQ ID NO: 4120 - RNA, 20 nt, synthetic construct
  source 1..20: mol_type = other RNA
tagtgggattgctggccctt

SEQ ID NO: 4121 - RNA, 20 nt, synthetic construct
  source 1..20: mol_type = other RNA
ttagtgggattgctggccct

SEQ ID NO: 4122 - RNA, 20 nt, synthetic construct
  source 1..20: mol_type = other RNA
tttagtgggattgctggccc

SEQ ID NO: 4123 - RNA, 20 nt, synthetic construct
  source 1..20: mol_type = other RNA
gtttagtgggattgctggcc

SEQ ID NO: 4124 - RNA, 20 nt, synthetic construct
  source 1..20: mol_type = other RNA
tgtttagtgggattgctggc

SEQ ID NO: 4125 - RNA, 20 nt, synthetic construct
  source 1..20: mol_type = other RNA
atgtttagtgggattgctgg

SEQ ID NO: 4126 - RNA, 20 nt, synthetic construct
  source 1..20: mol_type = other RNA
gatgtttagtgggattgctg

SEQ ID NO: 4127 - RNA, 20 nt, synthetic construct
  source 1..20: mol_type = other RNA
tgatgtttagtgggattgct

SEQ ID NO: 4128 - RNA, 20 nt, synthetic construct
  source 1..20: mol_type = other RNA
gtgatgtttagtgggattgc

SEQ ID NO: 4129 - RNA, 20 nt, synthetic construct
  source 1..20: mol_type = other RNA
tgtgatgtttagtgggattg

SEQ ID NO: 4130 - RNA, 20 nt, synthetic construct
  source 1..20: mol_type = other RNA
gtgtgatgtttagtgggatt

SEQ ID NO: 4131 - RNA, 20 nt, synthetic construct
  source 1..20: mol_type = other RNA
cgtgtgatgtttagtgggat

SEQ ID NO: 4132 - RNA, 20 nt, synthetic construct
  source 1..20: mol_type = other RNA
tcgtgtgatgtttagtggga

SEQ ID NO: 4133 - RNA, 20 nt, synthetic construct
  source 1..20: mol_type = other RNA
gtcgtgtgatgtttagtggg

SEQ ID NO: 4134 - RNA, 20 nt, synthetic construct
  source 1..20: mol_type = other RNA
tgtcgtgtgatgtttagtgg

SEQ ID NO: 4135 - RNA, 20 nt, synthetic construct
  source 1..20: mol_type = other RNA
gtgtcgtgtgatgtttagtg

SEQ ID NO: 4136 - RNA, 20 nt, synthetic construct
  source 1..20: mol_type = other RNA
tgtgtcgtgtgatgtttagt

SEQ ID NO: 4137 - RNA, 20 nt, synthetic construct
  source 1..20: mol_type = other RNA
gtgtgtcgtgtgatgtttag

SEQ ID NO: 4138 - RNA, 20 nt, synthetic construct
  source 1..20: mol_type = other RNA
tgtgtgtcgtgtgatgttta

SEQ ID NO: 4139 - RNA, 20 nt, synthetic construct
  source 1..20: mol_type = other RNA
ctgtgtgtcgtgtgatgttt

SEQ ID NO: 4140 - RNA, 20 nt, synthetic construct
  source 1..20: mol_type = other RNA
tctgtgtgtcgtgtgatgtt

SEQ ID NO: 4141 - RNA, 20 nt, synthetic construct
  source 1..20: mol_type = other RNA
ttctgtgtgtcgtgtgatgt

SEQ ID NO: 4142 - RNA, 20 nt, synthetic construct
  source 1..20: mol_type = other RNA
gttctgtgtgtcgtgtgatg

SEQ ID NO: 4143 - RNA, 20 nt, synthetic construct
  source 1..20: mol_type = other RNA
tgttctgtgtgtcgtgtgat

SEQ ID NO: 4144 - RNA, 20 nt, synthetic construct
  source 1..20: mol_type = other RNA
ttgttctgtgtgtcgtgtga

SEQ ID NO: 4145 - RNA, 20 nt, synthetic construct
  source 1..20: mol_type = other RNA
attgttctgtgtgtcgtgtg

SEQ ID NO: 4146 - RNA, 20 nt, synthetic construct
  source 1..20: mol_type = other RNA
gattgttctgtgtgtcgtgt

SEQ ID NO: 4147 - RNA, 20 nt, synthetic construct
  source 1..20: mol_type = other RNA
ggattgttctgtgtgtcgtg

SEQ ID NO: 4148 - RNA, 20 nt, synthetic construct
  source 1..20: mol_type = other RNA
gggattgttctgtgtgtcgt

SEQ ID NO: 4149 - RNA, 20 nt, synthetic construct
  source 1..20: mol_type = other RNA
ggggattgttctgtgtgtcg

SEQ ID NO: 4150 - RNA, 20 nt, synthetic construct
  source 1..20: mol_type = other RNA
gggggattgttctgtgtgtc

SEQ ID NO: 4151 - RNA, 20 nt, synthetic construct
  source 1..20: mol_type = other RNA
tgggggattgttctgtgtgt

SEQ ID NO: 4152 - RNA, 20 nt, synthetic construct
  source 1..20: mol_type = other RNA
gtgggggattgttctgtgtg

SEQ ID NO: 4153 - RNA, 20 nt, synthetic construct
  source 1..20: mol_type = other RNA
tgtgggggattgttctgtgt

SEQ ID NO: 4154 - RNA, 20 nt, synthetic construct
  source 1..20: mol_type = other RNA
ttgtgggggattgttctgtg

SEQ ID NO: 4155 - RNA, 20 nt, synthetic construct
  source 1..20: mol_type = other RNA
gttgtgggggattgttctgt

SEQ ID NO: 4156 - RNA, 20 nt, synthetic construct
  source 1..20: mol_type = other RNA
tgttgtgggggattgttctg

SEQ ID NO: 4157 - RNA, 20 nt, synthetic construct
  source 1..20: mol_type = other RNA
ttgttgtgggggattgttct

SEQ ID NO: 4158 - RNA, 20 nt, synthetic construct
  source 1..20: mol_type = other RNA
tttgttgtgggggattgttc

SEQ ID NO: 4159 - RNA, 20 nt, synthetic construct
  source 1..20: mol_type = other RNA
ctttgttgtgggggattgtt

SEQ ID NO: 4160 - RNA, 20 nt, synthetic construct
  source 1..20: mol_type = other RNA
tctttgttgtgggggattgt

SEQ ID NO: 4161 - RNA, 20 nt, synthetic construct
  source 1..20: mol_type = other RNA
ttctttgttgtgggggattg

SEQ ID NO: 4162 - RNA, 20 nt, synthetic construct
  source 1..20: mol_type = other RNA
cttctttgttgtgggggatt

SEQ ID NO: 4163 - RNA, 20 nt, synthetic construct
  source 1..20: mol_type = other RNA
acttctttgttgtgggggat

SEQ ID NO: 4164 - RNA, 20 nt, synthetic construct
  source 1..20: mol_type = other RNA
tacttctttgttgtggggga

SEQ ID NO: 4165 - RNA, 20 nt, synthetic construct
  source 1..20: mol_type = other RNA
atacttctttgttgtggggg

SEQ ID NO: 4166 - RNA, 20 nt, synthetic construct
  source 1..20: mol_type = other RNA
gatacttctttgttgtgggg

SEQ ID NO: 4167 - RNA, 20 nt, synthetic construct
  source 1..20: mol_type = other RNA
ggatacttctttgttgtggg

SEQ ID NO: 4168 - RNA, 20 nt, synthetic construct
  source 1..20: mol_type = other RNA
aggatacttctttgttgtgg

SEQ ID NO: 4169 - RNA, 20 nt, synthetic construct
  source 1..20: mol_type = other RNA
caggatacttctttgttgtg

SEQ ID NO: 4170 - RNA, 20 nt, synthetic construct
  source 1..20: mol_type = other RNA
gcaggatacttctttgttgt

SEQ ID NO: 4171 - RNA, 20 nt, synthetic construct
  source 1..20: mol_type = other RNA
ggcaggatacttctttgttg

SEQ ID NO: 4172 - RNA, 20 nt, synthetic construct
  source 1..20: mol_type = other RNA
gggcaggatacttctttgtt

SEQ ID NO: 4173 - RNA, 20 nt, synthetic construct
  source 1..20: mol_type = other RNA
tgggcaggatacttctttgt

SEQ ID NO: 4174 - RNA, 20 nt, synthetic construct
  source 1..20: mol_type = other RNA
ttgggcaggatacttctttg

SEQ ID NO: 4175 - RNA, 20 nt, synthetic construct
  source 1..20: mol_type = other RNA
tttgggcaggatacttcttt

SEQ ID NO: 4176 - RNA, 20 nt, synthetic construct
  source 1..20: mol_type = other RNA
ttttgggcaggatacttctt

SEQ ID NO: 4177 - RNA, 20 nt, synthetic construct
  source 1..20: mol_type = other RNA
cttttgggcaggatacttct

SEQ ID NO: 4178 - RNA, 20 nt, synthetic construct
  source 1..20: mol_type = other RNA
ccttttgggcaggatacttc

SEQ ID NO: 4179 - RNA, 20 nt, synthetic construct
  source 1..20: mol_type = other RNA
accttttgggcaggatactt

SEQ ID NO: 4180 - RNA, 20 nt, synthetic construct
  source 1..20: mol_type = other RNA
gaccttttgggcaggatact

SEQ ID NO: 4181 - RNA, 20 nt, synthetic construct
  source 1..20: mol_type = other RNA
tgaccttttgggcaggatac

SEQ ID NO: 4182 - RNA, 20 nt, synthetic construct
  source 1..20: mol_type = other RNA
ttgaccttttgggcaggata

SEQ ID NO: 4183 - RNA, 20 nt, synthetic construct
  source 1..20: mol_type = other RNA
attgaccttttgggcaggat

SEQ ID NO: 4184 - RNA, 20 nt, synthetic construct
  source 1..20: mol_type = other RNA
tattgaccttttgggcagga

SEQ ID NO: 4185 - RNA, 20 nt, synthetic construct
  source 1..20: mol_type = other RNA
ctattgaccttttgggcagg

SEQ ID NO: 4186 - RNA, 20 nt, synthetic construct
  source 1..20: mol_type = other RNA
actattgaccttttgggcag

SEQ ID NO: 4187 - RNA, 20 nt, synthetic construct
  source 1..20: mol_type = other RNA
cactattgaccttttgggca

SEQ ID NO: 4188 - RNA, 20 nt, synthetic construct
  source 1..20: mol_type = other RNA
gcactattgaccttttgggc

SEQ ID NO: 4189 - RNA, 20 nt, synthetic construct
  source 1..20: mol_type = other RNA
agcactattgaccttttggg

SEQ ID NO: 4190 - RNA, 20 nt, synthetic construct
  source 1..20: mol_type = other RNA
cagcactattgaccttttgg

SEQ ID NO: 4191 - RNA, 20 nt, synthetic construct
  source 1..20: mol_type = other RNA
tcagcactattgaccttttg

SEQ ID NO: 4192 - RNA, 20 nt, synthetic construct
  source 1..20: mol_type = other RNA
ctcagcactattgacctttt

SEQ ID NO: 4193 - RNA, 20 nt, synthetic construct
  source 1..20: mol_type = other RNA
tctcagcactattgaccttt

SEQ ID NO: 4194 - RNA, 20 nt, synthetic construct
  source 1..20: mol_type = other RNA
gtctcagcactattgacctt

SEQ ID NO: 4195 - RNA, 20 nt, synthetic construct
  source 1..20: mol_type = other RNA
agtctcagcactattgacct

SEQ ID NO: 4196 - RNA, 20 nt, synthetic construct
  source 1..20: mol_type = other RNA
gagtctcagcactattgacc

SEQ ID NO: 4197 - RNA, 20 nt, synthetic construct
  source 1..20: mol_type = other RNA
tgagtctcagcactattgac

SEQ ID NO: 4198 - RNA, 20 nt, synthetic construct
  source 1..20: mol_type = other RNA
ttgagtctcagcactattga

SEQ ID NO: 4199 - RNA, 20 nt, synthetic construct
  source 1..20: mol_type = other RNA
gttgagtctcagcactattg

SEQ ID NO: 4200 - RNA, 20 nt, synthetic construct
  source 1..20: mol_type = other RNA
tgttgagtctcagcactatt

SEQ ID NO: 4201 - RNA, 20 nt, synthetic construct
  source 1..20: mol_type = other RNA
ttgttgagtctcagcactat

SEQ ID NO: 4202 - RNA, 20 nt, synthetic construct
  source 1..20: mol_type = other RNA
gttgttgagtctcagcacta

SEQ ID NO: 4203 - RNA, 20 nt, synthetic construct
  source 1..20: mol_type = other RNA
ggttgttgagtctcagcact

SEQ ID NO: 4204 - RNA, 20 nt, synthetic construct
  source 1..20: mol_type = other RNA
aggttgttgagtctcagcac

SEQ ID NO: 4205 - RNA, 20 nt, synthetic construct
  source 1..20: mol_type = other RNA
taggttgttgagtctcagca

SEQ ID NO: 4206 - RNA, 20 nt, synthetic construct
  source 1..20: mol_type = other RNA
gtaggttgttgagtctcagc

SEQ ID NO: 4207 - RNA, 20 nt, synthetic construct
  source 1..20: mol_type = other RNA
agtaggttgttgagtctcag

SEQ ID NO: 4208 - RNA, 20 nt, synthetic construct
  source 1..20: mol_type = other RNA
aagtaggttgttgagtctca

SEQ ID NO: 4209 - RNA, 20 nt, synthetic construct
  source 1..20: mol_type = other RNA
gaagtaggttgttgagtctc

SEQ ID NO: 4210 - RNA, 20 nt, synthetic construct
  source 1..20: mol_type = other RNA
tgaagtaggttgttgagtct

SEQ ID NO: 4211 - RNA, 20 nt, synthetic construct
  source 1..20: mol_type = other RNA
gtgaagtaggttgttgagtc

SEQ ID NO: 4212 - RNA, 20 nt, synthetic construct
  source 1..20: mol_type = other RNA
tgtgaagtaggttgttgagt

SEQ ID NO: 4213 - RNA, 20 nt, synthetic construct
  source 1..20: mol_type = other RNA
ttgtgaagtaggttgttgag

SEQ ID NO: 4214 - RNA, 20 nt, synthetic construct
  source 1..20: mol_type = other RNA
tttgtgaagtaggttgttga

SEQ ID NO: 4215 - RNA, 20 nt, synthetic construct
  source 1..20: mol_type = other RNA
atttgtgaagtaggttgttg

SEQ ID NO: 4216 - RNA, 20 nt, synthetic construct
  source 1..20: mol_type = other RNA
catttgtgaagtaggttgtt

SEQ ID NO: 4217 - RNA, 20 nt, synthetic construct
  source 1..20: mol_type = other RNA
acatttgtgaagtaggttgt

SEQ ID NO: 4218 - RNA, 20 nt, synthetic construct
  source 1..20: mol_type = other RNA
aacatttgtgaagtaggttg

SEQ ID NO: 4219 - RNA, 20 nt, synthetic construct
  source 1..20: mol_type = other RNA
aaacatttgtgaagtaggtt

SEQ ID NO: 4220 - RNA, 20 nt, synthetic construct
  source 1..20: mol_type = other RNA
gaaacatttgtgaagtaggt

SEQ ID NO: 4221 - RNA, 20 nt, synthetic construct
  source 1..20: mol_type = other RNA
agaaacatttgtgaagtagg

SEQ ID NO: 4222 - RNA, 20 nt, synthetic construct
  source 1..20: mol_type = other RNA
gagaaacatttgtgaagtag

SEQ ID NO: 4223 - RNA, 20 nt, synthetic construct
  source 1..20: mol_type = other RNA
agagaaacatttgtgaagta

SEQ ID NO: 4224 - RNA, 20 nt, synthetic construct
  source 1..20: mol_type = other RNA
gagagaaacatttgtgaagt

SEQ ID NO: 4225 - RNA, 20 nt, synthetic construct
  source 1..20: mol_type = other RNA
agagagaaacatttgtgaag

SEQ ID NO: 4226 - RNA, 20 nt, synthetic construct
  source 1..20: mol_type = other RNA
gagagagaaacatttgtgaa

SEQ ID NO: 4227 - RNA, 20 nt, synthetic construct
  source 1..20: mol_type = other RNA
agagagagaaacatttgtga

SEQ ID NO: 4228 - RNA, 20 nt, synthetic construct
  source 1..20: mol_type = other RNA
gagagagagaaacatttgtg

SEQ ID NO: 4229 - RNA, 20 nt, synthetic construct
  source 1..20: mol_type = other RNA
agagagagagaaacatttgt

SEQ ID NO: 4230 - RNA, 20 nt, synthetic construct
  source 1..20: mol_type = other RNA
gagagagagagaaacatttg

SEQ ID NO: 4231 - RNA, 20 nt, synthetic construct
  source 1..20: mol_type = other RNA
agagagagagagaaacattt

SEQ ID NO: 4232 - RNA, 20 nt, synthetic construct
  source 1..20: mol_type = other RNA
gagagagagagagaaacatt

SEQ ID NO: 4233 - RNA, 20 nt, synthetic construct
  source 1..20: mol_type = other RNA
agagagagagagagaaacat

SEQ ID NO: 4234 - RNA, 20 nt, synthetic construct
  source 1..20: mol_type = other RNA
gagagagagagagagaaaca

SEQ ID NO: 4235 - RNA, 20 nt, synthetic construct
  source 1..20: mol_type = other RNA
cgagagagagagagagaaac

SEQ ID NO: 4236 - RNA, 20 nt, synthetic construct
  source 1..20: mol_type = other RNA
gcgagagagagagagagaaa

SEQ ID NO: 4237 - RNA, 20 nt, synthetic construct
  source 1..20: mol_type = other RNA
agcgagagagagagagagaa

SEQ ID NO: 4238 - RNA, 20 nt, synthetic construct
  source 1..20: mol_type = other RNA
gagcgagagagagagagaga

SEQ ID NO: 4239 - RNA, 20 nt, synthetic construct
  source 1..20: mol_type = other RNA
agagcgagagagagagagag

SEQ ID NO: 4240 - RNA, 20 nt, synthetic construct
  source 1..20: mol_type = other RNA
aagagcgagagagagagaga

SEQ ID NO: 4241 - RNA, 20 nt, synthetic construct
  source 1..20: mol_type = other RNA
aaagagcgagagagagagag

SEQ ID NO: 4242 - RNA, 20 nt, synthetic construct
  source 1..20: mol_type = other RNA
aaaagagcgagagagagaga

SEQ ID NO: 4243 - RNA, 20 nt, synthetic construct
  source 1..20: mol_type = other RNA
aaaaagagcgagagagagag

SEQ ID NO: 4244 - RNA, 20 nt, synthetic construct
  source 1..20: mol_type = other RNA
aaaaaagagcgagagagaga

SEQ ID NO: 4245 - RNA, 20 nt, synthetic construct
  source 1..20: mol_type = other RNA
aaaaaaagagcgagagagag

SEQ ID NO: 4246 - RNA, 20 nt, synthetic construct
  source 1..20: mol_type = other RNA
aaaaaaaagagcgagagaga

SEQ ID NO: 4247 - RNA, 20 nt, synthetic construct
  source 1..20: mol_type = other RNA
aaaaaaaaagagcgagagag

SEQ ID NO: 4248 - RNA, 20 nt, synthetic construct
  source 1..20: mol_type = other RNA
aaaaaaaaaagagcgagaga

SEQ ID NO: 4249 - RNA, 20 nt, synthetic construct
  source 1..20: mol_type = other RNA
aaaaaaaaaaagagcgagag

SEQ ID NO: 4250 - RNA, 20 nt, synthetic construct
  source 1..20: mol_type = other RNA
aaaaaaaaaaaagagcgaga

SEQ ID NO: 4251 - RNA, 20 nt, synthetic construct
  source 1..20: mol_type = other RNA
aaaaaaaaaaaaagagcgag

SEQ ID NO: 4252 - RNA, 20 nt, synthetic construct
  source 1..20: mol_type = other RNA
aaaaaaaaaaaaaagagcga

SEQ ID NO: 4253 - RNA, 20 nt, synthetic construct
  source 1..20: mol_type = other RNA
aaaaaaaaaaaaaaagagcg

SEQ ID NO: 4254 - RNA, 20 nt, synthetic construct
  source 1..20: mol_type = other RNA
aaaaaaaaaaaaaaaagagc

SEQ ID NO: 4255 - RNA, 20 nt, synthetic construct
  source 1..20: mol_type = other RNA
aaaaaaaaaaaaaaaaagag

SEQ ID NO: 4256 - RNA, 20 nt, synthetic construct
  source 1..20: mol_type = other RNA
taaaaaaaaaaaaaaaaaga

SEQ ID NO: 4257 - RNA, 20 nt, synthetic construct
  source 1..20: mol_type = other RNA
ttaaaaaaaaaaaaaaaaag

SEQ ID NO: 4258 - RNA, 20 nt, synthetic construct
  source 1..20: mol_type = other RNA
gttaaaaaaaaaaaaaaaaa

SEQ ID NO: 4259 - RNA, 20 nt, synthetic construct
  source 1..20: mol_type = other RNA
tgttaaaaaaaaaaaaaaaa

SEQ ID NO: 4260 - RNA, 20 nt, synthetic construct
  source 1..20: mol_type = other RNA
atgttaaaaaaaaaaaaaaa

SEQ ID NO: 4261 - RNA, 20 nt, synthetic construct
  source 1..20: mol_type = other RNA
gatgttaaaaaaaaaaaaaa

SEQ ID NO: 4262 - RNA, 20 nt, synthetic construct
  source 1..20: mol_type = other RNA
tgatgttaaaaaaaaaaaaa

SEQ ID NO: 4263 - RNA, 20 nt, synthetic construct
  source 1..20: mol_type = other RNA
ctgatgttaaaaaaaaaaaa

SEQ ID NO: 4264 - RNA, 20 nt, synthetic construct
  source 1..20: mol_type = other RNA
tctgatgttaaaaaaaaaaa

SEQ ID NO: 4265 - RNA, 20 nt, synthetic construct
  source 1..20: mol_type = other RNA
ttctgatgttaaaaaaaaaa

SEQ ID NO: 4266 - RNA, 20 nt, synthetic construct
  source 1..20: mol_type = other RNA
cttctgatgttaaaaaaaaa

SEQ ID NO: 4267 - RNA, 20 nt, synthetic construct
  source 1..20: mol_type = other RNA
ccttctgatgttaaaaaaaa

SEQ ID NO: 4268 - RNA, 20 nt, synthetic construct
  source 1..20: mol_type = other RNA
cccttctgatgttaaaaaaa

SEQ ID NO: 4269 - RNA, 20 nt, synthetic construct
  source 1..20: mol_type = other RNA
acccttctgatgttaaaaaa

SEQ ID NO: 4270 - RNA, 20 nt, synthetic construct
  source 1..20: mol_type = other RNA
tacccttctgatgttaaaaa

SEQ ID NO: 4271 - RNA, 20 nt, synthetic construct
  source 1..20: mol_type = other RNA
ttacccttctgatgttaaaa

SEQ ID NO: 4272 - RNA, 20 nt, synthetic construct
  source 1..20: mol_type = other RNA
cttacccttctgatgttaaa

SEQ ID NO: 4273 - RNA, 20 nt, synthetic construct
  source 1..20: mol_type = other RNA
ccttacccttctgatgttaa

SEQ ID NO: 4274 - RNA, 20 nt, synthetic construct
  source 1..20: mol_type = other RNA
accttacccttctgatgtta

SEQ ID NO: 4275 - RNA, 20 nt, synthetic construct
  source 1..20: mol_type = other RNA
caccttacccttctgatgtt

SEQ ID NO: 4276 - RNA, 20 nt, synthetic construct
  source 1..20: mol_type = other RNA
gcaccttacccttctgatgt

SEQ ID NO: 4277 - RNA, 20 nt, synthetic construct
  source 1..20: mol_type = other RNA
ggcaccttacccttctgatg

SEQ ID NO: 4278 - RNA, 20 nt, synthetic construct
  source 1..20: mol_type = other RNA
tggcaccttacccttctgat

SEQ ID NO: 4279 - RNA, 20 nt, synthetic construct
  source 1..20: mol_type = other RNA
gtggcaccttacccttctga

SEQ ID NO: 4280 - RNA, 20 nt, synthetic construct
  source 1..20: mol_type = other RNA
cgtggcaccttacccttctg

SEQ ID NO: 4281 - RNA, 20 nt, synthetic construct
  source 1..20: mol_type = other RNA
tcgtggcaccttacccttct

SEQ ID NO: 4282 - RNA, 20 nt, synthetic construct
  source 1..20: mol_type = other RNA
atcgtggcaccttacccttc

SEQ ID NO: 4283 - RNA, 20 nt, synthetic construct
  source 1..20: mol_type = other RNA
tatcgtggcaccttaccctt

SEQ ID NO: 4284 - RNA, 20 nt, synthetic construct
  source 1..20: mol_type = other RNA
ttatcgtggcaccttaccct

SEQ ID NO: 4285 - RNA, 20 nt, synthetic construct
  source 1..20: mol_type = other RNA
gttatcgtggcaccttaccc

SEQ ID NO: 4286 - RNA, 20 nt, synthetic construct
  source 1..20: mol_type = other RNA
cgttatcgtggcaccttacc

SEQ ID NO: 4287 - RNA, 20 nt, synthetic construct
  source 1..20: mol_type = other RNA
tcgttatcgtggcaccttac

SEQ ID NO: 4288 - RNA, 20 nt, synthetic construct
  source 1..20: mol_type = other RNA
ctcgttatcgtggcacctta

SEQ ID NO: 4289 - RNA, 20 nt, synthetic construct
  source 1..20: mol_type = other RNA
cctcgttatcgtggcacctt

SEQ ID NO: 4290 - RNA, 20 nt, synthetic construct
  source 1..20: mol_type = other RNA
acctcgttatcgtggcacct

SEQ ID NO: 4291 - RNA, 20 nt, synthetic construct
  source 1..20: mol_type = other RNA
gacctcgttatcgtggcacc

SEQ ID NO: 4292 - RNA, 20 nt, synthetic construct
  source 1..20: mol_type = other RNA
agacctcgttatcgtggcac

SEQ ID NO: 4293 - RNA, 20 nt, synthetic construct
  source 1..20: mol_type = other RNA
cagacctcgttatcgtggca

SEQ ID NO: 4294 - RNA, 20 nt, synthetic construct
  source 1..20: mol_type = other RNA
acagacctcgttatcgtggc

SEQ ID NO: 4295 - RNA, 20 nt, synthetic construct
  source 1..20: mol_type = other RNA
tacagacctcgttatcgtgg

SEQ ID NO: 4296 - RNA, 20 nt, synthetic construct
  source 1..20: mol_type = other RNA
ttacagacctcgttatcgtg

SEQ ID NO: 4297 - RNA, 20 nt, synthetic construct
  source 1..20: mol_type = other RNA
attacagacctcgttatcgt

SEQ ID NO: 4298 - RNA, 20 nt, synthetic construct
  source 1..20: mol_type = other RNA
aattacagacctcgttatcg

SEQ ID NO: 4299 - RNA, 20 nt, synthetic construct
  source 1..20: mol_type = other RNA
gaattacagacctcgttatc

SEQ ID NO: 4300 - RNA, 20 nt, synthetic construct
  source 1..20: mol_type = other RNA
ggaattacagacctcgttat

SEQ ID NO: 4301 - RNA, 20 nt, synthetic construct
  source 1..20: mol_type = other RNA
gggaattacagacctcgtta

SEQ ID NO: 4302 - RNA, 20 nt, synthetic construct
  source 1..20: mol_type = other RNA
agggaattacagacctcgtt

SEQ ID NO: 4303 - RNA, 20 nt, synthetic construct
  source 1..20: mol_type = other RNA
tagggaattacagacctcgt

SEQ ID NO: 4304 - RNA, 20 nt, synthetic construct
  source 1..20: mol_type = other RNA
gtagggaattacagacctcg

SEQ ID NO: 4305 - RNA, 20 nt, synthetic construct
  source 1..20: mol_type = other RNA
agtagggaattacagacctc

SEQ ID NO: 4306 - RNA, 20 nt, synthetic construct
  source 1..20: mol_type = other RNA
gagtagggaattacagacct

SEQ ID NO: 4307 - RNA, 20 nt, synthetic construct
  source 1..20: mol_type = other RNA
tgagtagggaattacagacc

SEQ ID NO: 4308 - RNA, 20 nt, synthetic construct
  source 1..20: mol_type = other RNA
ctgagtagggaattacagac

SEQ ID NO: 4309 - RNA, 20 nt, synthetic construct
  source 1..20: mol_type = other RNA
cctgagtagggaattacaga

SEQ ID NO: 4310 - RNA, 20 nt, synthetic construct
  source 1..20: mol_type = other RNA
tcctgagtagggaattacag

SEQ ID NO: 4311 - RNA, 20 nt, synthetic construct
  source 1..20: mol_type = other RNA
ctcctgagtagggaattaca

SEQ ID NO: 4312 - RNA, 20 nt, synthetic construct
  source 1..20: mol_type = other RNA
cctcctgagtagggaattac

SEQ ID NO: 4313 - RNA, 20 nt, synthetic construct
  source 1..20: mol_type = other RNA
gcctcctgagtagggaatta

SEQ ID NO: 4314 - RNA, 20 nt, synthetic construct
  source 1..20: mol_type = other RNA
ggcctcctgagtagggaatt

SEQ ID NO: 4315 - RNA, 20 nt, synthetic construct
  source 1..20: mol_type = other RNA
cggcctcctgagtagggaat

SEQ ID NO: 4316 - RNA, 20 nt, synthetic construct
  source 1..20: mol_type = other RNA
tcggcctcctgagtagggaa

SEQ ID NO: 4317 - RNA, 20 nt, synthetic construct
  source 1..20: mol_type = other RNA
ctcggcctcctgagtaggga

SEQ ID NO: 4318 - RNA, 20 nt, synthetic construct
  source 1..20: mol_type = other RNA
cctcggcctcctgagtaggg

SEQ ID NO: 4319 - RNA, 20 nt, synthetic construct
  source 1..20: mol_type = other RNA
gcctcggcctcctgagtagg

SEQ ID NO: 4320 - RNA, 20 nt, synthetic construct
  source 1..20: mol_type = other RNA
tgcctcggcctcctgagtag

SEQ ID NO: 4321 - RNA, 20 nt, synthetic construct
  source 1..20: mol_type = other RNA
ctgcctcggcctcctgagta

SEQ ID NO: 4322 - RNA, 20 nt, synthetic construct
  source 1..20: mol_type = other RNA
cctgcctcggcctcctgagt

SEQ ID NO: 4323 - RNA, 20 nt, synthetic construct
  source 1..20: mol_type = other RNA
tcctgcctcggcctcctgag

SEQ ID NO: 4324 - RNA, 20 nt, synthetic construct
  source 1..20: mol_type = other RNA
ctcctgcctcggcctcctga

SEQ ID NO: 4325 - RNA, 20 nt, synthetic construct
  source 1..20: mol_type = other RNA
tctcctgcctcggcctcctg

SEQ ID NO: 4326 - RNA, 20 nt, synthetic construct
  source 1..20: mol_type = other RNA
ttctcctgcctcggcctcct

SEQ ID NO: 4327 - RNA, 20 nt, synthetic construct
  source 1..20: mol_type = other RNA
attctcctgcctcggcctcc

SEQ ID NO: 4328 - RNA, 20 nt, synthetic construct
  source 1..20: mol_type = other RNA
gattctcctgcctcggcctc

SEQ ID NO: 4329 - RNA, 20 nt, synthetic construct
  source 1..20: mol_type = other RNA
cgattctcctgcctcggcct

SEQ ID NO: 4330 - RNA, 20 nt, synthetic construct
  source 1..20: mol_type = other RNA
gcgattctcctgcctcggcc

SEQ ID NO: 4331 - RNA, 20 nt, synthetic construct
  source 1..20: mol_type = other RNA
agcgattctcctgcctcggc

SEQ ID NO: 4332 - RNA, 20 nt, synthetic construct
  source 1..20: mol_type = other RNA
aagcgattctcctgcctcgg

SEQ ID NO: 4333 - RNA, 20 nt, synthetic construct
  source 1..20: mol_type = other RNA
caagcgattctcctgcctcg

SEQ ID NO: 4334 - RNA, 20 nt, synthetic construct
  source 1..20: mol_type = other RNA
tcaagcgattctcctgcctc

SEQ ID NO: 4335 - RNA, 20 nt, synthetic construct
  source 1..20: mol_type = other RNA
ttcaagcgattctcctgcct

SEQ ID NO: 4336 - RNA, 20 nt, synthetic construct
  source 1..20: mol_type = other RNA
gttcaagcgattctcctgcc

SEQ ID NO: 4337 - RNA, 20 nt, synthetic construct
  source 1..20: mol_type = other RNA
ggttcaagcgattctcctgc

SEQ ID NO: 4338 - RNA, 20 nt, synthetic construct
  source 1..20: mol_type = other RNA
gggttcaagcgattctcctg

SEQ ID NO: 4339 - RNA, 20 nt, synthetic construct
  source 1..20: mol_type = other RNA
cgggttcaagcgattctcct

SEQ ID NO: 4340 - RNA, 20 nt, synthetic construct
  source 1..20: mol_type = other RNA
ccgggttcaagcgattctcc

SEQ ID NO: 4341 - RNA, 20 nt, synthetic construct
  source 1..20: mol_type = other RNA
cccgggttcaagcgattctc

SEQ ID NO: 4342 - RNA, 20 nt, synthetic construct
  source 1..20: mol_type = other RNA
tcccgggttcaagcgattct

SEQ ID NO: 4343 - RNA, 20 nt, synthetic construct
  source 1..20: mol_type = other RNA
atcccgggttcaagcgattc

SEQ ID NO: 4344 - RNA, 20 nt, synthetic construct
  source 1..20: mol_type = other RNA
catcccgggttcaagcgatt

SEQ ID NO: 4345 - RNA, 20 nt, synthetic construct
  source 1..20: mol_type = other RNA
gcatcccgggttcaagcgat

SEQ ID NO: 4346 - RNA, 20 nt, synthetic construct
  source 1..20: mol_type = other RNA
tgcatcccgggttcaagcga

SEQ ID NO: 4347 - RNA, 20 nt, synthetic construct
  source 1..20: mol_type = other RNA
ctgcatcccgggttcaagcg

SEQ ID NO: 4348 - RNA, 20 nt, synthetic construct
  source 1..20: mol_type = other RNA
tctgcatcccgggttcaagc

SEQ ID NO: 4349 - RNA, 20 nt, synthetic construct
  source 1..20: mol_type = other RNA
ctctgcatcccgggttcaag

SEQ ID NO: 4350 - RNA, 20 nt, synthetic construct
  source 1..20: mol_type = other RNA
cctctgcatcccgggttcaa

SEQ ID NO: 4351 - RNA, 20 nt, synthetic construct
  source 1..20: mol_type = other RNA
acctctgcatcccgggttca

SEQ ID NO: 4352 - RNA, 20 nt, synthetic construct
  source 1..20: mol_type = other RNA
aacctctgcatcccgggttc

SEQ ID NO: 4353 - RNA, 20 nt, synthetic construct
  source 1..20: mol_type = other RNA
caacctctgcatcccgggtt

SEQ ID NO: 4354 - RNA, 20 nt, synthetic construct
  source 1..20: mol_type = other RNA
gcaacctctgcatcccgggt

SEQ ID NO: 4355 - RNA, 20 nt, synthetic construct
  source 1..20: mol_type = other RNA
tgcaacctctgcatcccggg

SEQ ID NO: 4356 - RNA, 20 nt, synthetic construct
  source 1..20: mol_type = other RNA
ctgcaacctctgcatcccgg

SEQ ID NO: 4357 - RNA, 20 nt, synthetic construct
  source 1..20: mol_type = other RNA
actgcaacctctgcatcccg

SEQ ID NO: 4358 - RNA, 20 nt, synthetic construct
  source 1..20: mol_type = other RNA
tactgcaacctctgcatccc

SEQ ID NO: 4359 - RNA, 20 nt, synthetic construct
  source 1..20: mol_type = other RNA
ttactgcaacctctgcatcc

SEQ ID NO: 4360 - RNA, 20 nt, synthetic construct
  source 1..20: mol_type = other RNA
tttactgcaacctctgcatc

SEQ ID NO: 4361 - RNA, 20 nt, synthetic construct
  source 1..20: mol_type = other RNA
gtttactgcaacctctgcat

SEQ ID NO: 4362 - RNA, 20 nt, synthetic construct
  source 1..20: mol_type = other RNA
ggtttactgcaacctctgca

SEQ ID NO: 4363 - RNA, 20 nt, synthetic construct
  source 1..20: mol_type = other RNA
cggtttactgcaacctctgc

SEQ ID NO: 4364 - RNA, 20 nt, synthetic construct
  source 1..20: mol_type = other RNA
tcggtttactgcaacctctg

SEQ ID NO: 4365 - RNA, 20 nt, synthetic construct
  source 1..20: mol_type = other RNA
ctcggtttactgcaacctct

SEQ ID NO: 4366 - RNA, 20 nt, synthetic construct
  source 1..20: mol_type = other RNA
tctcggtttactgcaacctc

SEQ ID NO: 4367 - RNA, 20 nt, synthetic construct
  source 1..20: mol_type = other RNA
atctcggtttactgcaacct

SEQ ID NO: 4368 - RNA, 20 nt, synthetic construct
  source 1..20: mol_type = other RNA
gatctcggtttactgcaacc

SEQ ID NO: 4369 - RNA, 20 nt, synthetic construct
  source 1..20: mol_type = other RNA
cgatctcggtttactgcaac

SEQ ID NO: 4370 - RNA, 20 nt, synthetic construct
  source 1..20: mol_type = other RNA
acgatctcggtttactgcaa

SEQ ID NO: 4371 - RNA, 20 nt, synthetic construct
  source 1..20: mol_type = other RNA
cacgatctcggtttactgca

SEQ ID NO: 4372 - RNA, 20 nt, synthetic construct
  source 1..20: mol_type = other RNA
gcacgatctcggtttactgc

SEQ ID NO: 4373 - RNA, 20 nt, synthetic construct
  source 1..20: mol_type = other RNA
ggcacgatctcggtttactg

SEQ ID NO: 4374 - RNA, 20 nt, synthetic construct
  source 1..20: mol_type = other RNA
tggcacgatctcggtttact

SEQ ID NO: 4375 - RNA, 20 nt, synthetic construct
  source 1..20: mol_type = other RNA
gtggcacgatctcggtttac

SEQ ID NO: 4376 - RNA, 20 nt, synthetic construct
  source 1..20: mol_type = other RNA
agtggcacgatctcggttta

SEQ ID NO: 4377 - RNA, 20 nt, synthetic construct
  source 1..20: mol_type = other RNA
cagtggcacgatctcggttt

SEQ ID NO: 4378 - RNA, 20 nt, synthetic construct
  source 1..20: mol_type = other RNA
gcagtggcacgatctcggtt

SEQ ID NO: 4379 - RNA, 20 nt, synthetic construct
  source 1..20: mol_type = other RNA
tgcagtggcacgatctcggt

SEQ ID NO: 4380 - RNA, 20 nt, synthetic construct
  source 1..20: mol_type = other RNA
atgcagtggcacgatctcgg

SEQ ID NO: 4381 - RNA, 20 nt, synthetic construct
  source 1..20: mol_type = other RNA
aatgcagtggcacgatctcg

SEQ ID NO: 4382 - RNA, 20 nt, synthetic construct
  source 1..20: mol_type = other RNA
gaatgcagtggcacgatctc

SEQ ID NO: 4383 - RNA, 20 nt, synthetic construct
  source 1..20: mol_type = other RNA
ggaatgcagtggcacgatct

SEQ ID NO: 4384 - RNA, 20 nt, synthetic construct
  source 1..20: mol_type = other RNA
tggaatgcagtggcacgatc

SEQ ID NO: 4385 - RNA, 20 nt, synthetic construct
  source 1..20: mol_type = other RNA
ctggaatgcagtggcacgat

SEQ ID NO: 4386 - RNA, 20 nt, synthetic construct
  source 1..20: mol_type = other RNA
gctggaatgcagtggcacga

SEQ ID NO: 4387 - RNA, 20 nt, synthetic construct
  source 1..20: mol_type = other RNA
ggctggaatgcagtggcacg

SEQ ID NO: 4388 - RNA, 20 nt, synthetic construct
  source 1..20: mol_type = other RNA
aggctggaatgcagtggcac

SEQ ID NO: 4389 - RNA, 20 nt, synthetic construct
  source 1..20: mol_type = other RNA
caggctggaatgcagtggca

SEQ ID NO: 4390 - RNA, 20 nt, synthetic construct
  source 1..20: mol_type = other RNA
ccaggctggaatgcagtggc

SEQ ID NO: 4391 - RNA, 20 nt, synthetic construct
  source 1..20: mol_type = other RNA
tccaggctggaatgcagtgg

SEQ ID NO: 4392 - RNA, 20 nt, synthetic construct
  source 1..20: mol_type = other RNA
gtccaggctggaatgcagtg

SEQ ID NO: 4393 - RNA, 20 nt, synthetic construct
  source 1..20: mol_type = other RNA
tgtccaggctggaatgcagt

SEQ ID NO: 4394 - RNA, 20 nt, synthetic construct
  source 1..20: mol_type = other RNA
ttgtccaggctggaatgcag

SEQ ID NO: 4395 - RNA, 20 nt, synthetic construct
  source 1..20: mol_type = other RNA
gttgtccaggctggaatgca

SEQ ID NO: 4396 - RNA, 20 nt, synthetic construct
  source 1..20: mol_type = other RNA
tgttgtccaggctggaatgc

SEQ ID NO: 4397 - RNA, 20 nt, synthetic construct
  source 1..20: mol_type = other RNA
ctgttgtccaggctggaatg

SEQ ID NO: 4398 - RNA, 20 nt, synthetic construct
  source 1..20: mol_type = other RNA
tctgttgtccaggctggaat

SEQ ID NO: 4399 - RNA, 20 nt, synthetic construct
  source 1..20: mol_type = other RNA
ctctgttgtccaggctggaa

SEQ ID NO: 4400 - RNA, 20 nt, synthetic construct
  source 1..20: mol_type = other RNA
gctctgttgtccaggctgga

SEQ ID NO: 4401 - RNA, 20 nt, synthetic construct
  source 1..20: mol_type = other RNA
cgctctgttgtccaggctgg

SEQ ID NO: 4402 - RNA, 20 nt, synthetic construct
  source 1..20: mol_type = other RNA
tcgctctgttgtccaggctg

SEQ ID NO: 4403 - RNA, 20 nt, synthetic construct
  source 1..20: mol_type = other RNA
ctcgctctgttgtccaggct

SEQ ID NO: 4404 - RNA, 20 nt, synthetic construct
  source 1..20: mol_type = other RNA
tctcgctctgttgtccaggc

SEQ ID NO: 4405 - RNA, 20 nt, synthetic construct
  source 1..20: mol_type = other RNA
gtctcgctctgttgtccagg

SEQ ID NO: 4406 - RNA, 20 nt, synthetic construct
  source 1..20: mol_type = other RNA
agtctcgctctgttgtccag

SEQ ID NO: 4407 - RNA, 20 nt, synthetic construct
  source 1..20: mol_type = other RNA
gagtctcgctctgttgtcca

SEQ ID NO: 4408 - RNA, 20 nt, synthetic construct
  source 1..20: mol_type = other RNA
ggagtctcgctctgttgtcc

SEQ ID NO: 4409 - RNA, 20 nt, synthetic construct
  source 1..20: mol_type = other RNA
tggagtctcgctctgttgtc

SEQ ID NO: 4410 - RNA, 20 nt, synthetic construct
  source 1..20: mol_type = other RNA
atggagtctcgctctgttgt

SEQ ID NO: 4411 - RNA, 20 nt, synthetic construct
  source 1..20: mol_type = other RNA
gatggagtctcgctctgttg

SEQ ID NO: 4412 - RNA, 20 nt, synthetic construct
  source 1..20: mol_type = other RNA
ggatggagtctcgctctgtt

SEQ ID NO: 4413 - RNA, 20 nt, synthetic construct
  source 1..20: mol_type = other RNA
tggatggagtctcgctctgt

SEQ ID NO: 4414 - RNA, 20 nt, synthetic construct
  source 1..20: mol_type = other RNA
gtggatggagtctcgctctg

SEQ ID NO: 4415 - RNA, 20 nt, synthetic construct
  source 1..20: mol_type = other RNA
ggtggatggagtctcgctct

SEQ ID NO: 4416 - RNA, 20 nt, synthetic construct
  source 1..20: mol_type = other RNA
gggtggatggagtctcgctc

SEQ ID NO: 4417 - RNA, 20 nt, synthetic construct
  source 1..20: mol_type = other RNA
ggggtggatggagtctcgct

SEQ ID NO: 4418 - RNA, 20 nt, synthetic construct
  source 1..20: mol_type = other RNA
gggggtggatggagtctcgc

SEQ ID NO: 4419 - RNA, 20 nt, synthetic construct
  source 1..20: mol_type = other RNA
cgggggtggatggagtctcg

SEQ ID NO: 4420 - RNA, 20 nt, synthetic construct
  source 1..20: mol_type = other RNA
gcgggggtggatggagtctc

SEQ ID NO: 4421 - RNA, 20 nt, synthetic construct
  source 1..20: mol_type = other RNA
ggcgggggtggatggagtct

SEQ ID NO: 4422 - RNA, 20 nt, synthetic construct
  source 1..20: mol_type = other RNA
tggcgggggtggatggagtc

SEQ ID NO: 4423 - RNA, 20 nt, synthetic construct
  source 1..20: mol_type = other RNA
ttggcgggggtggatggagt

SEQ ID NO: 4424 - RNA, 20 nt, synthetic construct
  source 1..20: mol_type = other RNA
gttggcgggggtggatggag

SEQ ID NO: 4425 - RNA, 20 nt, synthetic construct
  source 1..20: mol_type = other RNA
tgttggcgggggtggatgga

SEQ ID NO: 4426 - RNA, 20 nt, synthetic construct
  source 1..20: mol_type = other RNA
gtgttggcgggggtggatgg

SEQ ID NO: 4427 - RNA, 20 nt, synthetic construct
  source 1..20: mol_type = other RNA
tgtgttggcgggggtggatg

SEQ ID NO: 4428 - RNA, 20 nt, synthetic construct
  source 1..20: mol_type = other RNA
ttgtgttggcgggggtggat

SEQ ID NO: 4429 - RNA, 20 nt, synthetic construct
  source 1..20: mol_type = other RNA
tttgtgttggcgggggtgga

SEQ ID NO: 4430 - RNA, 20 nt, synthetic construct
  source 1..20: mol_type = other RNA
ttttgtgttggcgggggtgg

SEQ ID NO: 4431 - RNA, 20 nt, synthetic construct
  source 1..20: mol_type = other RNA
tttttgtgttggcgggggtg

SEQ ID NO: 4432 - RNA, 20 nt, synthetic construct
  source 1..20: mol_type = other RNA
ttttttgtgttggcgggggt

SEQ ID NO: 4433 - RNA, 20 nt, synthetic construct
  source 1..20: mol_type = other RNA
tttttttgtgttggcggggg

SEQ ID NO: 4434 - RNA, 20 nt, synthetic construct
  source 1..20: mol_type = other RNA
atttttttgtgttggcgggg

SEQ ID NO: 4435 - RNA, 20 nt, synthetic construct
  source 1..20: mol_type = other RNA
aatttttttgtgttggcggg

SEQ ID NO: 4436 - RNA, 20 nt, synthetic construct
  source 1..20: mol_type = other RNA
taatttttttgtgttggcgg

SEQ ID NO: 4437 - RNA, 20 nt, synthetic construct
  source 1..20: mol_type = other RNA
ttaatttttttgtgttggcg

SEQ ID NO: 4438 - RNA, 20 nt, synthetic construct
  source 1..20: mol_type = other RNA
tttaatttttttgtgttggc

SEQ ID NO: 4439 - RNA, 20 nt, synthetic construct
  source 1..20: mol_type = other RNA
ctttaatttttttgtgttgg

SEQ ID NO: 4440 - RNA, 20 nt, synthetic construct
  source 1..20: mol_type = other RNA
actttaatttttttgtgttg

SEQ ID NO: 4441 - RNA, 20 nt, synthetic construct
  source 1..20: mol_type = other RNA
cactttaatttttttgtgtt

SEQ ID NO: 4442 - RNA, 20 nt, synthetic construct
  source 1..20: mol_type = other RNA
acactttaatttttttgtgt

SEQ ID NO: 4443 - RNA, 20 nt, synthetic construct
  source 1..20: mol_type = other RNA
tacactttaatttttttgtg

SEQ ID NO: 4444 - RNA, 20 nt, synthetic construct
  source 1..20: mol_type = other RNA
gtacactttaatttttttgt

SEQ ID NO: 4445 - RNA, 20 nt, synthetic construct
  source 1..20: mol_type = other RNA
tgtacactttaatttttttg

SEQ ID NO: 4446 - RNA, 20 nt, synthetic construct
  source 1..20: mol_type = other RNA
ttgtacactttaattttttt

SEQ ID NO: 4447 - RNA, 20 nt, synthetic construct
  source 1..20: mol_type = other RNA
gttgtacactttaatttttt

SEQ ID NO: 4448 - RNA, 20 nt, synthetic construct
  source 1..20: mol_type = other RNA
agttgtacactttaattttt

SEQ ID NO: 4449 - RNA, 20 nt, synthetic construct
  source 1..20: mol_type = other RNA
gagttgtacactttaatttt

SEQ ID NO: 4450 - RNA, 20 nt, synthetic construct
  source 1..20: mol_type = other RNA
tgagttgtacactttaattt

SEQ ID NO: 4451 - RNA, 20 nt, synthetic construct
  source 1..20: mol_type = other RNA
ttgagttgtacactttaatt

SEQ ID NO: 4452 - RNA, 20 nt, synthetic construct
  source 1..20: mol_type = other RNA
attgagttgtacactttaat

SEQ ID NO: 4453 - RNA, 20 nt, synthetic construct
  source 1..20: mol_type = other RNA
cattgagttgtacactttaa

SEQ ID NO: 4454 - RNA, 20 nt, synthetic construct
  source 1..20: mol_type = other RNA
ccattgagttgtacacttta

SEQ ID NO: 4455 - RNA, 20 nt, synthetic construct
  source 1..20: mol_type = other RNA
accattgagttgtacacttt

SEQ ID NO: 4456 - RNA, 20 nt, synthetic construct
  source 1..20: mol_type = other RNA
aaccattgagttgtacactt

SEQ ID NO: 4457 - RNA, 20 nt, synthetic construct
  source 1..20: mol_type = other RNA
aaaccattgagttgtacact

SEQ ID NO: 4458 - RNA, 20 nt, synthetic construct
  source 1..20: mol_type = other RNA
aaaaccattgagttgtacac

SEQ ID NO: 4459 - RNA, 20 nt, synthetic construct
  source 1..20: mol_type = other RNA
aaaaaccattgagttgtaca

SEQ ID NO: 4460 - RNA, 20 nt, synthetic construct
  source 1..20: mol_type = other RNA
taaaaaccattgagttgtac

SEQ ID NO: 4461 - RNA, 20 nt, synthetic construct
  source 1..20: mol_type = other RNA
ctaaaaaccattgagttgta

SEQ ID NO: 4462 - RNA, 20 nt, synthetic construct
  source 1..20: mol_type = other RNA
actaaaaaccattgagttgt

SEQ ID NO: 4463 - RNA, 20 nt, synthetic construct
  source 1..20: mol_type = other RNA
cactaaaaaccattgagttg

SEQ ID NO: 4464 - RNA, 20 nt, synthetic construct
  source 1..20: mol_type = other RNA
acactaaaaaccattgagtt

SEQ ID NO: 4465 - RNA, 20 nt, synthetic construct
  source 1..20: mol_type = other RNA
gacactaaaaaccattgagt

SEQ ID NO: 4466 - RNA, 20 nt, synthetic construct
  source 1..20: mol_type = other RNA
agacactaaaaaccattgag

SEQ ID NO: 4467 - RNA, 20 nt, synthetic construct
  source 1..20: mol_type = other RNA
aagacactaaaaaccattga

SEQ ID NO: 4468 - RNA, 20 nt, synthetic construct
  source 1..20: mol_type = other RNA
taagacactaaaaaccattg

SEQ ID NO: 4469 - RNA, 20 nt, synthetic construct
  source 1..20: mol_type = other RNA
ttaagacactaaaaaccatt

SEQ ID NO: 4470 - RNA, 20 nt, synthetic construct
  source 1..20: mol_type = other RNA
cttaagacactaaaaaccat

SEQ ID NO: 4471 - RNA, 20 nt, synthetic construct
  source 1..20: mol_type = other RNA
tcttaagacactaaaaacca

SEQ ID NO: 4472 - RNA, 20 nt, synthetic construct
  source 1..20: mol_type = other RNA
ctcttaagacactaaaaacc

SEQ ID NO: 4473 - RNA, 20 nt, synthetic construct
  source 1..20: mol_type = other RNA
tctcttaagacactaaaaac

SEQ ID NO: 4474 - RNA, 20 nt, synthetic construct
  source 1..20: mol_type = other RNA
ctctcttaagacactaaaaa

SEQ ID NO: 4475 - RNA, 20 nt, synthetic construct
  source 1..20: mol_type = other RNA
actctcttaagacactaaaa

SEQ ID NO: 4476 - RNA, 20 nt, synthetic construct
  source 1..20: mol_type = other RNA
aactctcttaagacactaaa

SEQ ID NO: 4477 - RNA, 20 nt, synthetic construct
  source 1..20: mol_type = other RNA
taactctcttaagacactaa

SEQ ID NO: 4478 - RNA, 20 nt, synthetic construct
  source 1..20: mol_type = other RNA
ataactctcttaagacacta

SEQ ID NO: 4479 - RNA, 20 nt, synthetic construct
  source 1..20: mol_type = other RNA
cataactctcttaagacact

SEQ ID NO: 4480 - RNA, 20 nt, synthetic construct
  source 1..20: mol_type = other RNA
gcataactctcttaagacac

SEQ ID NO: 4481 - RNA, 20 nt, synthetic construct
  source 1..20: mol_type = other RNA
tgcataactctcttaagaca

SEQ ID NO: 4482 - RNA, 20 nt, synthetic construct
  source 1..20: mol_type = other RNA
ctgcataactctcttaagac

SEQ ID NO: 4483 - RNA, 20 nt, synthetic construct
  source 1..20: mol_type = other RNA
gctgcataactctcttaaga

SEQ ID NO: 4484 - RNA, 20 nt, synthetic construct
  source 1..20: mol_type = other RNA
tgctgcataactctcttaag

SEQ ID NO: 4485 - RNA, 20 nt, synthetic construct
  source 1..20: mol_type = other RNA
atgctgcataactctcttaa

SEQ ID NO: 4486 - RNA, 20 nt, synthetic construct
  source 1..20: mol_type = other RNA
gatgctgcataactctctta

SEQ ID NO: 4487 - RNA, 20 nt, synthetic construct
  source 1..20: mol_type = other RNA
tgatgctgcataactctctt

SEQ ID NO: 4488 - RNA, 20 nt, synthetic construct
  source 1..20: mol_type = other RNA
atgatgctgcataactctct

SEQ ID NO: 4489 - RNA, 20 nt, synthetic construct
  source 1..20: mol_type = other RNA
aatgatgctgcataactctc

SEQ ID NO: 4490 - RNA, 20 nt, synthetic construct
  source 1..20: mol_type = other RNA
taatgatgctgcataactct

SEQ ID NO: 4491 - RNA, 20 nt, synthetic construct
  source 1..20: mol_type = other RNA
gtaatgatgctgcataactc

SEQ ID NO: 4492 - RNA, 20 nt, synthetic construct
  source 1..20: mol_type = other RNA
tgtaatgatgctgcataact

SEQ ID NO: 4493 - RNA, 20 nt, synthetic construct
  source 1..20: mol_type = other RNA
ttgtaatgatgctgcataac

SEQ ID NO: 4494 - RNA, 20 nt, synthetic construct
  source 1..20: mol_type = other RNA
attgtaatgatgctgcataa

SEQ ID NO: 4495 - RNA, 20 nt, synthetic construct
  source 1..20: mol_type = other RNA
gattgtaatgatgctgcata

SEQ ID NO: 4496 - RNA, 20 nt, synthetic construct
  source 1..20: mol_type = other RNA
tgattgtaatgatgctgcat

SEQ ID NO: 4497 - RNA, 20 nt, synthetic construct
  source 1..20: mol_type = other RNA
ctgattgtaatgatgctgca

SEQ ID NO: 4498 - RNA, 20 nt, synthetic construct
  source 1..20: mol_type = other RNA
actgattgtaatgatgctgc

SEQ ID NO: 4499 - RNA, 20 nt, synthetic construct
  source 1..20: mol_type = other RNA
aactgattgtaatgatgctg

SEQ ID NO: 4500 - RNA, 20 nt, synthetic construct
  source 1..20: mol_type = other RNA
aaactgattgtaatgatgct

SEQ ID NO: 4501 - RNA, 20 nt, synthetic construct
  source 1..20: mol_type = other RNA
taaactgattgtaatgatgc

SEQ ID NO: 4502 - RNA, 20 nt, synthetic construct
  source 1..20: mol_type = other RNA
ttaaactgattgtaatgatg

SEQ ID NO: 4503 - RNA, 20 nt, synthetic construct
  source 1..20: mol_type = other RNA
cttaaactgattgtaatgat

SEQ ID NO: 4504 - RNA, 20 nt, synthetic construct
  source 1..20: mol_type = other RNA
tcttaaactgattgtaatga

SEQ ID NO: 4505 - RNA, 20 nt, synthetic construct
  source 1..20: mol_type = other RNA
gtcttaaactgattgtaatg

SEQ ID NO: 4506 - RNA, 20 nt, synthetic construct
  source 1..20: mol_type = other RNA
ggtcttaaactgattgtaat

SEQ ID NO: 4507 - RNA, 20 nt, synthetic construct
  source 1..20: mol_type = other RNA
tggtcttaaactgattgtaa

SEQ ID NO: 4508 - RNA, 20 nt, synthetic construct
  source 1..20: mol_type = other RNA
atggtcttaaactgattgta

SEQ ID NO: 4509 - RNA, 20 nt, synthetic construct
  source 1..20: mol_type = other RNA
aatggtcttaaactgattgt

SEQ ID NO: 4510 - RNA, 20 nt, synthetic construct
  source 1..20: mol_type = other RNA
aaatggtcttaaactgattg

SEQ ID NO: 4511 - RNA, 20 nt, synthetic construct
  source 1..20: mol_type = other RNA
aaaatggtcttaaactgatt

SEQ ID NO: 4512 - RNA, 20 nt, synthetic construct
  source 1..20: mol_type = other RNA
aaaaatggtcttaaactgat

SEQ ID NO: 4513 - RNA, 20 nt, synthetic construct
  source 1..20: mol_type = other RNA
taaaaatggtcttaaactga

SEQ ID NO: 4514 - RNA, 20 nt, synthetic construct
  source 1..20: mol_type = other RNA
ataaaaatggtcttaaactg

SEQ ID NO: 4515 - RNA, 20 nt, synthetic construct
  source 1..20: mol_type = other RNA
gataaaaatggtcttaaact

SEQ ID NO: 4516 - RNA, 20 nt, synthetic construct
  source 1..20: mol_type = other RNA
tgataaaaatggtcttaaac

SEQ ID NO: 4517 - RNA, 20 nt, synthetic construct
  source 1..20: mol_type = other RNA
gtgataaaaatggtcttaaa

SEQ ID NO: 4518 - RNA, 20 nt, synthetic construct
  source 1..20: mol_type = other RNA
ggtgataaaaatggtcttaa

SEQ ID NO: 4519 - RNA, 20 nt, synthetic construct
  source 1..20: mol_type = other RNA
tggtgataaaaatggtctta

SEQ ID NO: 4520 - RNA, 20 nt, synthetic construct
  source 1..20: mol_type = other RNA
gtggtgataaaaatggtctt

SEQ ID NO: 4521 - RNA, 20 nt, synthetic construct
  source 1..20: mol_type = other RNA
tgtggtgataaaaatggtct

SEQ ID NO: 4522 - RNA, 20 nt, synthetic construct
  source 1..20: mol_type = other RNA
ctgtggtgataaaaatggtc

SEQ ID NO: 4523 - RNA, 20 nt, synthetic construct
  source 1..20: mol_type = other RNA
tctgtggtgataaaaatggt

SEQ ID NO: 4524 - RNA, 20 nt, synthetic construct
  source 1..20: mol_type = other RNA
ttctgtggtgataaaaatgg

SEQ ID NO: 4525 - RNA, 20 nt, synthetic construct
  source 1..20: mol_type = other RNA
cttctgtggtgataaaaatg

SEQ ID NO: 4526 - RNA, 20 nt, synthetic construct
  source 1..20: mol_type = other RNA
ccttctgtggtgataaaaat

SEQ ID NO: 4527 - RNA, 20 nt, synthetic construct
  source 1..20: mol_type = other RNA
gccttctgtggtgataaaaa

SEQ ID NO: 4528 - RNA, 20 nt, synthetic construct
  source 1..20: mol_type = other RNA
tgccttctgtggtgataaaa

SEQ ID NO: 4529 - RNA, 20 nt, synthetic construct
  source 1..20: mol_type = other RNA
ctgccttctgtggtgataaa

SEQ ID NO: 4530 - RNA, 20 nt, synthetic construct
  source 1..20: mol_type = other RNA
gctgccttctgtggtgataa

SEQ ID NO: 4531 - RNA, 20 nt, synthetic construct
  source 1..20: mol_type = other RNA
ggctgccttctgtggtgata

SEQ ID NO: 4532 - RNA, 20 nt, synthetic construct
  source 1..20: mol_type = other RNA
aggctgccttctgtggtgat

SEQ ID NO: 4533 - RNA, 20 nt, synthetic construct
  source 1..20: mol_type = other RNA
aaggctgccttctgtggtga

SEQ ID NO: 4534 - RNA, 20 nt, synthetic construct
  source 1..20: mol_type = other RNA
taaggctgccttctgtggtg

SEQ ID NO: 4535 - RNA, 20 nt, synthetic construct
  source 1..20: mol_type = other RNA
ataaggctgccttctgtggt

SEQ ID NO: 4536 - RNA, 20 nt, synthetic construct
  source 1..20: mol_type = other RNA
cataaggctgccttctgtgg

SEQ ID NO: 4537 - RNA, 20 nt, synthetic construct
  source 1..20: mol_type = other RNA
acataaggctgccttctgtg

SEQ ID NO: 4538 - RNA, 20 nt, synthetic construct
  source 1..20: mol_type = other RNA
gacataaggctgccttctgt

SEQ ID NO: 4539 - RNA, 20 nt, synthetic construct
  source 1..20: mol_type = other RNA
ggacataaggctgccttctg

SEQ ID NO: 4540 - RNA, 20 nt, synthetic construct
  source 1..20: mol_type = other RNA
aggacataaggctgccttct

SEQ ID NO: 4541 - RNA, 20 nt, synthetic construct
  source 1..20: mol_type = other RNA
aaggacataaggctgccttc

SEQ ID NO: 4542 - RNA, 20 nt, synthetic construct
  source 1..20: mol_type = other RNA
aaaggacataaggctgcctt

SEQ ID NO: 4543 - RNA, 20 nt, synthetic construct
  source 1..20: mol_type = other RNA
taaaggacataaggctgcct

SEQ ID NO: 4544 - RNA, 20 nt, synthetic construct
  source 1..20: mol_type = other RNA
ctaaaggacataaggctgcc

SEQ ID NO: 4545 - RNA, 20 nt, synthetic construct
  source 1..20: mol_type = other RNA
gctaaaggacataaggctgc

SEQ ID NO: 4546 - RNA, 20 nt, synthetic construct
  source 1..20: mol_type = other RNA
tgctaaaggacataaggctg

SEQ ID NO: 4547 - RNA, 20 nt, synthetic construct
  source 1..20: mol_type = other RNA
ctgctaaaggacataaggct

SEQ ID NO: 4548 - RNA, 20 nt, synthetic construct
  source 1..20: mol_type = other RNA
actgctaaaggacataaggc

SEQ ID NO: 4549 - RNA, 20 nt, synthetic construct
  source 1..20: mol_type = other RNA
gactgctaaaggacataagg

SEQ ID NO: 4550 - RNA, 20 nt, synthetic construct
  source 1..20: mol_type = other RNA
tgactgctaaaggacataag

SEQ ID NO: 4551 - RNA, 20 nt, synthetic construct
  source 1..20: mol_type = other RNA
gtgactgctaaaggacataa

SEQ ID NO: 4552 - RNA, 20 nt, synthetic construct
  source 1..20: mol_type = other RNA
ggtgactgctaaaggacata

SEQ ID NO: 4553 - RNA, 20 nt, synthetic construct
  source 1..20: mol_type = other RNA
gggtgactgctaaaggacat

SEQ ID NO: 4554 - RNA, 20 nt, synthetic construct
  source 1..20: mol_type = other RNA
agggtgactgctaaaggaca

SEQ ID NO: 4555 - RNA, 20 nt, synthetic construct
  source 1..20: mol_type = other RNA
gagggtgactgctaaaggac

SEQ ID NO: 4556 - RNA, 20 nt, synthetic construct
  source 1..20: mol_type = other RNA
ggagggtgactgctaaagga

SEQ ID NO: 4557 - RNA, 20 nt, synthetic construct
  source 1..20: mol_type = other RNA
gggagggtgactgctaaagg

SEQ ID NO: 4558 - RNA, 20 nt, synthetic construct
  source 1..20: mol_type = other RNA
agggagggtgactgctaaag

SEQ ID NO: 4559 - RNA, 20 nt, synthetic construct
  source 1..20: mol_type = other RNA
tagggagggtgactgctaaa

SEQ ID NO: 4560 - RNA, 20 nt, synthetic construct
  source 1..20: mol_type = other RNA
ttagggagggtgactgctaa

SEQ ID NO: 4561 - RNA, 20 nt, synthetic construct
  source 1..20: mol_type = other RNA
gttagggagggtgactgcta

SEQ ID NO: 4562 - RNA, 20 nt, synthetic construct
  source 1..20: mol_type = other RNA
ggttagggagggtgactgct

SEQ ID NO: 4563 - RNA, 20 nt, synthetic construct
  source 1..20: mol_type = other RNA
gggttagggagggtgactgc

SEQ ID NO: 4564 - RNA, 20 nt, synthetic construct
  source 1..20: mol_type = other RNA
agggttagggagggtgactg

SEQ ID NO: 4565 - RNA, 20 nt, synthetic construct
  source 1..20: mol_type = other RNA
tagggttagggagggtgact

SEQ ID NO: 4566 - RNA, 20 nt, synthetic construct
  source 1..20: mol_type = other RNA
ctagggttagggagggtgac

SEQ ID NO: 4567 - RNA, 20 nt, synthetic construct
  source 1..20: mol_type = other RNA
cctagggttagggagggtga

SEQ ID NO: 4568 - RNA, 20 nt, synthetic construct
  source 1..20: mol_type = other RNA
gcctagggttagggagggtg

SEQ ID NO: 4569 - RNA, 20 nt, synthetic construct
  source 1..20: mol_type = other RNA
tgcctagggttagggagggt

SEQ ID NO: 4570 - RNA, 20 nt, synthetic construct
  source 1..20: mol_type = other RNA
tcggagttggggggtgccac

SEQ ID NO: 4571 - RNA, 20 nt, synthetic construct
  source 1..20: mol_type = other RNA
ggcactcggagttggggggt

SEQ ID NO: 4572 - RNA, 20 nt, synthetic construct
  source 1..20: mol_type = other RNA
tcctctccccttggcactcg

SEQ ID NO: 4573 - RNA, 20 nt, synthetic construct
  source 1..20: mol_type = other RNA
gaatttcctctccccttggc

SEQ ID NO: 4574 - RNA, 20 nt, synthetic construct
  source 1..20: mol_type = other RNA
ttttgggaatttcctctccc

SEQ ID NO: 4575 - RNA, 20 nt, synthetic construct
  source 1..20: mol_type = other RNA
gctccccttttgggaatttc

SEQ ID NO: 4576 - RNA, 20 nt, synthetic construct
  source 1..20: mol_type = other RNA
tgagaccttggcttctcgaa

SEQ ID NO: 4577 - RNA, 20 nt, synthetic construct
  source 1..20: mol_type = other RNA
tgggaacgagacctgagacc

SEQ ID NO: 4578 - RNA, 20 nt, synthetic construct
  source 1..20: mol_type = other RNA
cgagggcctgggaacgagac

SEQ ID NO: 4579 - RNA, 20 nt, synthetic construct
  source 1..20: mol_type = other RNA
ctctcctggtggtggtgggt

SEQ ID NO: 4580 - RNA, 20 nt, synthetic construct
  source 1..20: mol_type = other RNA
tcccctctcctggtggtggt

SEQ ID NO: 4581 - RNA, 20 nt, synthetic construct
  source 1..20: mol_type = other RNA
ttcttcccctctcctggtgg

SEQ ID NO: 4582 - RNA, 20 nt, synthetic construct
  source 1..20: mol_type = other RNA
gctggcttcttcccctctcc

SEQ ID NO: 4583 - RNA, 20 nt, synthetic construct
  source 1..20: mol_type = other RNA
ctgtcggtaggtgctggctt

SEQ ID NO: 4584 - RNA, 20 nt, synthetic construct
  source 1..20: mol_type = other RNA
agctccacccctgtcggtag

SEQ ID NO: 4585 - RNA, 20 nt, synthetic construct
  source 1..20: mol_type = other RNA
acccagctccacccctgtcg

SEQ ID NO: 4586 - RNA, 20 nt, synthetic construct
  source 1..20: mol_type = other RNA
cttgacccagctccacccct

SEQ ID NO: 4587 - RNA, 20 nt, synthetic construct
  source 1..20: mol_type = other RNA
ggagtctcagccggagacaa

SEQ ID NO: 4588 - RNA, 20 nt, synthetic construct
  source 1..20: mol_type = other RNA
gaggttcccctggagtctca

SEQ ID NO: 4589 - RNA, 20 nt, synthetic construct
  source 1..20: mol_type = other RNA
gcttgaggttcccctggagt

SEQ ID NO: 4590 - RNA, 20 nt, synthetic construct
  source 1..20: mol_type = other RNA
gtgagcttgaggttcccctg

SEQ ID NO: 4591 - RNA, 20 nt, synthetic construct
  source 1..20: mol_type = other RNA
cgccagggccatgtgagctt

SEQ ID NO: 4592 - RNA, 20 nt, synthetic construct
  source 1..20: mol_type = other RNA
ggcccgccagggccatgtga

SEQ ID NO: 4593 - RNA, 20 nt, synthetic construct
  source 1..20: mol_type = other RNA
caggggcccgccagggccat

SEQ ID NO: 4594 - RNA, 20 nt, synthetic construct
  source 1..20: mol_type = other RNA
tgcccaggggcccgccaggg

SEQ ID NO: 4595 - RNA, 20 nt, synthetic construct
  source 1..20: mol_type = other RNA
tgctcctgcccaggggcccg

SEQ ID NO: 4596 - RNA, 20 nt, synthetic construct
  source 1..20: mol_type = other RNA
ggatgggttaaggaaggcga

SEQ ID NO: 4597 - RNA, 20 nt, synthetic construct
  source 1..20: mol_type = other RNA
aggcgcctgcaggatgggtt

SEQ ID NO: 4598 - RNA, 20 nt, synthetic construct
  source 1..20: mol_type = other RNA
ccccaggcgcctgcaggatg

SEQ ID NO: 4599 - RNA, 20 nt, synthetic construct
  source 1..20: mol_type = other RNA
aactcccccaggcgcctgca

SEQ ID NO: 4600 - RNA, 20 nt, synthetic construct
  source 1..20: mol_type = other RNA
gcgctatcatctctagcaaa

SEQ ID NO: 4601 - RNA, 20 nt, synthetic construct
  source 1..20: mol_type = other RNA
tctgcctggcccaggccctt

SEQ ID NO: 4602 - RNA, 20 nt, synthetic construct
  source 1..20: mol_type = other RNA
atccatctctgcctggccca

SEQ ID NO: 4603 - RNA, 20 nt, synthetic construct
  source 1..20: mol_type = other RNA
tctcccatcatccatctctg

SEQ ID NO: 4604 - RNA, 20 nt, synthetic construct
  source 1..20: mol_type = other RNA
cccatctcccatcatccatc

SEQ ID NO: 4605 - RNA, 20 nt, synthetic construct
  source 1..20: mol_type = other RNA
tctctcctggcccatctccc

SEQ ID NO: 4606 - RNA, 20 nt, synthetic construct
  source 1..20: mol_type = other RNA
gggcctctcctctctcctgg

SEQ ID NO: 4607 - RNA, 20 nt, synthetic construct
  source 1..20: mol_type = other RNA
tccctgggcctctcctctct

SEQ ID NO: 4608 - RNA, 20 nt, synthetic construct
  source 1..20: mol_type = other RNA
gctttccctgggcctctcct

SEQ ID NO: 4609 - RNA, 20 nt, synthetic construct
  source 1..20: mol_type = other RNA
gtgcagacactgccgttcct

SEQ ID NO: 4610 - RNA, 20 nt, synthetic construct
  source 1..20: mol_type = other RNA
cccctgtgcagacactgccg

SEQ ID NO: 4611 - RNA, 20 nt, synthetic construct
  source 1..20: mol_type = other RNA
ccatcccctgtgcagacact

SEQ ID NO: 4612 - RNA, 20 nt, synthetic construct
  source 1..20: mol_type = other RNA
agtctccatcccctgtgcag

SEQ ID NO: 4613 - RNA, 20 nt, synthetic construct
  source 1..20: mol_type = other RNA
cttgctcaggctgcagcagt

SEQ ID NO: 4614 - RNA, 20 nt, synthetic construct
  source 1..20: mol_type = other RNA
gttccttgctcaggctgcag

SEQ ID NO: 4615 - RNA, 20 nt, synthetic construct
  source 1..20: mol_type = other RNA
tcagctccagttccttgctc

SEQ ID NO: 4616 - RNA, 20 nt, synthetic construct
  source 1..20: mol_type = other RNA
gggtgccacctagtggaaga

SEQ ID NO: 4617 - RNA, 20 nt, synthetic construct
  source 1..20: mol_type = other RNA
tggggggtgccacctagtgg

SEQ ID NO: 4618 - RNA, 20 nt, synthetic construct
  source 1..20: mol_type = other RNA
tcggagttggggggtgccac

SEQ ID NO: 4619 - RNA, 20 nt, synthetic construct
  source 1..20: mol_type = other RNA
ggcactcggagttggggggt

SEQ ID NO: 4620 - RNA, 20 nt, synthetic construct
  source 1..20: mol_type = other RNA
tcctctccccttggcactcg

SEQ ID NO: 4621 - RNA, 20 nt, synthetic construct
  source 1..20: mol_type = other RNA
gaatttcctctccccttggc

SEQ ID NO: 4622 - RNA, 20 nt, synthetic construct
  source 1..20: mol_type = other RNA
ttttgggaatttcctctccc

SEQ ID NO: 4623 - RNA, 20 nt, synthetic construct
  source 1..20: mol_type = other RNA
gctccccttttgggaatttc

SEQ ID NO: 4624 - RNA, 20 nt, synthetic construct
  source 1..20: mol_type = other RNA
tgagaccttggcttctcgaa

SEQ ID NO: 4625 - RNA, 20 nt, synthetic construct
  source 1..20: mol_type = other RNA
tgggaacgagacctgagacc

SEQ ID NO: 4626 - RNA, 20 nt, synthetic construct
  source 1..20: mol_type = other RNA
cgagggcctgggaacgagac

SEQ ID NO: 4627 - RNA, 20 nt, synthetic construct
  source 1..20: mol_type = other RNA
ctctcctggtggtggtgggt

SEQ ID NO: 4628 - RNA, 20 nt, synthetic construct
  source 1..20: mol_type = other RNA
tcccctctcctggtggtggt

SEQ ID NO: 4629 - RNA, 20 nt, synthetic construct
  source 1..20: mol_type = other RNA
ttcttcccctctcctggtgg

SEQ ID NO: 4630 - RNA, 20 nt, synthetic construct
  source 1..20: mol_type = other RNA
gctggcttcttcccctctcc

SEQ ID NO: 4631 - RNA, 20 nt, synthetic construct
  source 1..20: mol_type = other RNA
ctgtcggtaggtgctggctt

SEQ ID NO: 4632 - RNA, 20 nt, synthetic construct
  source 1..20: mol_type = other RNA
agctccacccctgtcggtag

SEQ ID NO: 4633 - RNA, 20 nt, synthetic construct
  source 1..20: mol_type = other RNA
acccagctccacccctgtcg

SEQ ID NO: 4634 - RNA, 20 nt, synthetic construct
  source 1..20: mol_type = other RNA
cttgacccagctccacccct

SEQ ID NO: 4635 - RNA, 20 nt, synthetic construct
  source 1..20: mol_type = other RNA
ggagtctcagccggagacaa

SEQ ID NO: 4636 - RNA, 20 nt, synthetic construct
  source 1..20: mol_type = other RNA
gaggttcccctggagtctca

SEQ ID NO: 4637 - RNA, 20 nt, synthetic construct
  source 1..20: mol_type = other RNA
gcttgaggttcccctggagt

SEQ ID NO: 4638 - RNA, 20 nt, synthetic construct
  source 1..20: mol_type = other RNA
gtgagcttgaggttcccctg

SEQ ID NO: 4639 - RNA, 20 nt, synthetic construct
  source 1..20: mol_type = other RNA
cgccagggccatgtgagctt

SEQ ID NO: 4640 - RNA, 20 nt, synthetic construct
  source 1..20: mol_type = other RNA
ggcccgccagggccatgtga

SEQ ID NO: 4641 - RNA, 20 nt, synthetic construct
  source 1..20: mol_type = other RNA
caggggcccgccagggccat

SEQ ID NO: 4642 - RNA, 20 nt, synthetic construct
  source 1..20: mol_type = other RNA
tgcccaggggcccgccaggg

SEQ ID NO: 4643 - RNA, 20 nt, synthetic construct
  source 1..20: mol_type = other RNA
tgctcctgcccaggggcccg

SEQ ID NO: 4644 - RNA, 20 nt, synthetic construct
  source 1..20: mol_type = other RNA
ggatgggttaaggaaggcga

SEQ ID NO: 4645 - RNA, 20 nt, synthetic construct
  source 1..20: mol_type = other RNA
aggcgcctgcaggatgggtt

SEQ ID NO: 4646 - RNA, 20 nt, synthetic construct
  source 1..20: mol_type = other RNA
ccccaggcgcctgcaggatg

SEQ ID NO: 4647 - RNA, 20 nt, synthetic construct
  source 1..20: mol_type = other RNA
aactcccccaggcgcctgca

SEQ ID NO: 4648 - RNA, 20 nt, synthetic construct
  source 1..20: mol_type = other RNA
gcgctatcatctctagcaaa

SEQ ID NO: 4649 - RNA, 20 nt, synthetic construct
  source 1..20: mol_type = other RNA
tctgcctggcccaggccctt

SEQ ID NO: 4650 - RNA, 20 nt, synthetic construct
  source 1..20: mol_type = other RNA
atccatctctgcctggccca

SEQ ID NO: 4651 - RNA, 20 nt, synthetic construct
  source 1..20: mol_type = other RNA
tctcccatcatccatctctg

SEQ ID NO: 4652 - RNA, 20 nt, synthetic construct
  source 1..20: mol_type = other RNA
cccatctcccatcatccatc

SEQ ID NO: 4653 - RNA, 20 nt, synthetic construct
  source 1..20: mol_type = other RNA
tctctcctggcccatctccc

SEQ ID NO: 4654 - RNA, 20 nt, synthetic construct
  source 1..20: mol_type = other RNA
gggcctctcctctctcctgg

SEQ ID NO: 4655 - RNA, 20 nt, synthetic construct
  source 1..20: mol_type = other RNA
tccctgggcctctcctctct

SEQ ID NO: 4656 - RNA, 20 nt, synthetic construct
  source 1..20: mol_type = other RNA
gctttccctgggcctctcct

SEQ ID NO: 4657 - RNA, 20 nt, synthetic construct
  source 1..20: mol_type = other RNA
gtgcagacactgccgttcct

SEQ ID NO: 4658 - RNA, 20 nt, synthetic construct
  source 1..20: mol_type = other RNA
cccctgtgcagacactgccg

SEQ ID NO: 4659 - RNA, 20 nt, synthetic construct
  source 1..20: mol_type = other RNA
ccatcccctgtgcagacact

SEQ ID NO: 4660 - RNA, 20 nt, synthetic construct
  source 1..20: mol_type = other RNA
agtctccatcccctgtgcag

SEQ ID NO: 4661 - RNA, 20 nt, synthetic construct
  source 1..20: mol_type = other RNA
cttgctcaggctgcagcagt

SEQ ID NO: 4662 - RNA, 20 nt, synthetic construct
  source 1..20: mol_type = other RNA
gttccttgctcaggctgcag

SEQ ID NO: 4663 - RNA, 20 nt, synthetic construct
  source 1..20: mol_type = other RNA
tcagctccagttccttgctc

SEQ ID NO: 4664 - RNA, 20 nt, synthetic construct
  source 1..20: mol_type = other RNA
ggttggctccccttttggga

SEQ ID NO: 4665 - RNA, 20 nt, synthetic construct
  source 1..20: mol_type = other RNA
gccactttttcctgctcatt

SEQ ID NO: 4666 - RNA, 20 nt, synthetic construct
  source 1..20: mol_type = other RNA
ctccgagggcctgggaacga

SEQ ID NO: 4667 - RNA, 20 nt, synthetic construct
  source 1..20: mol_type = other RNA
agccggaggggcgcgcgacc

SEQ ID NO: 4668 - RNA, 20 nt, synthetic construct
  source 1..20: mol_type = other RNA
tgggtggttcccgcggcggc

SEQ ID NO: 4669 - RNA, 20 nt, synthetic construct
  source 1..20: mol_type = other RNA
aagcagggaccacaccattc

SEQ ID NO: 4670 - RNA, 20 nt, synthetic construct
  source 1..20: mol_type = other RNA
gaaggggctttctacctccc

SEQ ID NO: 4671 - RNA, 20 nt, synthetic construct
  source 1..20: mol_type = other RNA
agtaattgcagtgacgcccc

SEQ ID NO: 4672 - RNA, 20 nt, synthetic construct
  source 1..20: mol_type = other RNA
tctgatacactagggggagt

SEQ ID NO: 4673 - RNA, 20 nt, synthetic construct
  source 1..20: mol_type = other RNA
gaaccgcttactgaaactcc

SEQ ID NO: 4674 - RNA, 20 nt, synthetic construct
  source 1..20: mol_type = other RNA
gccgcgcagacctctcgcct

SEQ ID NO: 4675 - RNA, 20 nt, synthetic construct
  source 1..20: mol_type = other RNA
caaggaccgcggagtcggac

SEQ ID NO: 4676 - RNA, 20 nt, synthetic construct
  source 1..20: mol_type = other RNA
agtctgagcgctacccggtt

SEQ ID NO: 4677 - RNA, 20 nt, synthetic construct
  source 1..20: mol_type = other RNA
aggtaggcgggtcatcgcgc

SEQ ID NO: 4678 - RNA, 20 nt, synthetic construct
  source 1..20: mol_type = other RNA
agcgggtagccctgatccct

SEQ ID NO: 4679 - RNA, 20 nt, synthetic construct
  source 1..20: mol_type = other RNA
cctctatattgataagtagc

SEQ ID NO: 4680 - RNA, 20 nt, synthetic construct
  source 1..20: mol_type = other RNA
gagtgatttgagtagaaaag

SEQ ID NO: 4681 - RNA, 20 nt, synthetic construct
  source 1..20: mol_type = other RNA
gatccctagaaatggggtgt

SEQ ID NO: 4682 - RNA, 20 nt, synthetic construct
  source 1..20: mol_type = other RNA
cgacgtcacatgattctcca

SEQ ID NO: 4683 - RNA, 20 nt, synthetic construct
  source 1..20: mol_type = other RNA
taaggaaggcgacgagcacc

SEQ ID NO: 4684 - RNA, 20 nt, synthetic construct
  source 1..20: mol_type = other RNA
aatgccccagacacgcgcta

SEQ ID NO: 4685 - RNA, 20 nt, synthetic construct
  source 1..20: mol_type = other RNA
aaaggcgagcacaaatattc

SEQ ID NO: 4686 - RNA, 20 nt, synthetic construct
  source 1..20: mol_type = other RNA
cagaacaaacaaacaaaagg

SEQ ID NO: 4687 - RNA, 20 nt, synthetic construct
  source 1..20: mol_type = other RNA
aacacacaagtccgggcgcg

SEQ ID NO: 4688 - RNA, 20 nt, synthetic construct
  source 1..20: mol_type = other RNA
gtgagctatgatcagcttgg

SEQ ID NO: 4689 - RNA, 20 nt, synthetic construct
  source 1..20: mol_type = other RNA
agaatcgctttgggagcagg

SEQ ID NO: 4690 - RNA, 20 nt, synthetic construct
  source 1..20: mol_type = other RNA
catttgtaatcccagcgcct

SEQ ID NO: 4691 - RNA, 20 nt, synthetic construct
  source 1..20: mol_type = other RNA
aggagcgagccagctcagta

SEQ ID NO: 4692 - RNA, 20 nt, synthetic construct
  source 1..20: mol_type = other RNA
gaatagggcaggacaggaca

SEQ ID NO: 4693 - RNA, 20 nt, synthetic construct
  source 1..20: mol_type = other RNA
atgtcaaccgagtttggaga

SEQ ID NO: 4694 - RNA, 20 nt, synthetic construct
  source 1..20: mol_type = other RNA
ttcaactcactctggggcct

SEQ ID NO: 4695 - RNA, 20 nt, synthetic construct
  source 1..20: mol_type = other RNA
gggctttggggctgtttatc

SEQ ID NO: 4696 - RNA, 20 nt, synthetic construct
  source 1..20: mol_type = other RNA
aatccctgctccctgtcctg

SEQ ID NO: 4697 - RNA, 20 nt, synthetic construct
  source 1..20: mol_type = other RNA
attagattcagcctgagact

SEQ ID NO: 4698 - RNA, 20 nt, synthetic construct
  source 1..20: mol_type = other RNA
tacacctggcaactggcgca

SEQ ID NO: 4699 - RNA, 20 nt, synthetic construct
  source 1..20: mol_type = other RNA
cctggagacaatctacttcc

SEQ ID NO: 4700 - RNA, 20 nt, synthetic construct
  source 1..20: mol_type = other RNA
gtggaatgaaatctcttctt

SEQ ID NO: 4701 - RNA, 20 nt, synthetic construct
  source 1..20: mol_type = other RNA
tcagctcaaggagatgctcc

SEQ ID NO: 4702 - RNA, 20 nt, synthetic construct
  source 1..20: mol_type = other RNA
ctccacctgccagttaaaat

SEQ ID NO: 4703 - RNA, 20 nt, synthetic construct
  source 1..20: mol_type = other RNA
ccatctggtttcccagggct

SEQ ID NO: 4704 - RNA, 20 nt, synthetic construct
  source 1..20: mol_type = other RNA
ggcattgaacatggcattca

SEQ ID NO: 4705 - RNA, 20 nt, synthetic construct
  source 1..20: mol_type = other RNA
ggcacccagcagctcctgaa

SEQ ID NO: 4706 - RNA, 20 nt, synthetic construct
  source 1..20: mol_type = other RNA
cttctctttcgacagccccc

SEQ ID NO: 4707 - RNA, 20 nt, synthetic construct
  source 1..20: mol_type = other RNA
cagggccgatctggagacta

SEQ ID NO: 4708 - RNA, 20 nt, synthetic construct
  source 1..20: mol_type = other RNA
cctcccatatcaattcctcg

SEQ ID NO: 4709 - RNA, 20 nt, synthetic construct
  source 1..20: mol_type = other RNA
tgtcactggctaatctgttc

SEQ ID NO: 4710 - RNA, 20 nt, synthetic construct
  source 1..20: mol_type = other RNA
tttggcaccaagcaggctga

SEQ ID NO: 4711 - RNA, 20 nt, synthetic construct
  source 1..20: mol_type = other RNA
acggcccagtatcaggcttt

SEQ ID NO: 4712 - RNA, 20 nt, synthetic construct
  source 1..20: mol_type = other RNA
cctcatcctcagctccagtt

SEQ ID NO: 4713 - RNA, 20 nt, synthetic construct
  source 1..20: mol_type = other RNA
cgagcttggttagccatccc

SEQ ID NO: 4714 - RNA, 20 nt, synthetic construct
  source 1..20: mol_type = other RNA
tccctcctccgacttctgct

SEQ ID NO: 4715 - RNA, 20 nt, synthetic construct
  source 1..20: mol_type = other RNA
acgactccacagctcggttg

SEQ ID NO: 4716 - RNA, 20 nt, synthetic construct
  source 1..20: mol_type = other RNA
gctctagctccaggcttaga

SEQ ID NO: 4717 - RNA, 20 nt, synthetic construct
  source 1..20: mol_type = other RNA
gccaggtgtcttatccgctg

SEQ ID NO: 4718 - RNA, 20 nt, synthetic construct
  source 1..20: mol_type = other RNA
tcaccagggcacagactagt

SEQ ID NO: 4719 - RNA, 20 nt, synthetic construct
  source 1..20: mol_type = other RNA
acaggaaggaaaataagcac

SEQ ID NO: 4720 - RNA, 20 nt, synthetic construct
  source 1..20: mol_type = other RNA
actatactccctagtctcaa

SEQ ID NO: 4721 - RNA, 20 nt, synthetic construct
  source 1..20: mol_type = other RNA
gtgtgtgtttcaatagaagc

SEQ ID NO: 4722 - RNA, 20 nt, synthetic construct
  source 1..20: mol_type = other RNA
tgatcgattcacctaacatt

SEQ ID NO: 4723 - RNA, 20 nt, synthetic construct
  source 1..20: mol_type = other RNA
tttttctggttctgggtggt

SEQ ID NO: 4724 - RNA, 20 nt, synthetic construct
  source 1..20: mol_type = other RNA
ttgtttcagtctgtttaggt

SEQ ID NO: 4725 - RNA, 20 nt, synthetic construct
  source 1..20: mol_type = other RNA
gaatcacggctttgacgatt

SEQ ID NO: 4726 - RNA, 20 nt, synthetic construct
  source 1..20: mol_type = other RNA
gtccctggccggcaaaattg

SEQ ID NO: 4727 - RNA, 20 nt, synthetic construct
  source 1..20: mol_type = other RNA
gattgtctccagacactcct

SEQ ID NO: 4728 - RNA, 20 nt, synthetic construct
  source 1..20: mol_type = other RNA
accagatgccagtgtccctc

SEQ ID NO: 4729 - RNA, 20 nt, synthetic construct
  source 1..20: mol_type = other RNA
gtgatgtttagtgggattgc

SEQ ID NO: 4730 - RNA, 20 nt, synthetic construct
  source 1..20: mol_type = other RNA
gtgggggattgttctgtgtg

SEQ ID NO: 4731 - RNA, 20 nt, synthetic construct
  source 1..20: mol_type = other RNA
gaccttttgggcaggatact

SEQ ID NO: 4732 - RNA, 20 nt, synthetic construct
  source 1..20: mol_type = other RNA
agtaggttgttgagtctcag

SEQ ID NO: 4733 - RNA, 20 nt, synthetic construct
  source 1..20: mol_type = other RNA
atcgtggcaccttacccttc

SEQ ID NO: 4734 - RNA, 20 nt, synthetic construct
  source 1..20: mol_type = other RNA
gagtagggaattacagacct

SEQ ID NO: 4735 - RNA, 20 nt, synthetic construct
  source 1..20: mol_type = other RNA
ttgtgttggcgggggtggat

SEQ ID NO: 4736 - RNA, 20 nt, synthetic construct
  source 1..20: mol_type = other RNA
gcataactctcttaagacac

SEQ ID NO: 4737 - RNA, 20 nt, synthetic construct
  source 1..20: mol_type = other RNA
ggctgccttctgtggtgata

SEQ ID NO: 4738 - RNA, 20 nt, synthetic construct
  source 1..20: mol_type = other RNA
ctagggttagggagggtgac

SEQ ID NO: 4739 - RNA, 30 nt, synthetic construct
  source 1..30: mol_type = other RNA
ttttttttttggacttgggagtggtgactg

SEQ ID NO: 4740 - RNA, 30 nt, synthetic construct; identical to SEQ ID NO: 4739
  source 1..30: mol_type = other RNA

SEQ ID NO: 4741 - RNA, 20 nt, synthetic construct
  source 1..20: mol_type = other RNA
gggtgccacctagtggaaga

SEQ ID NO: 4742 - RNA, 20 nt, synthetic construct
  source 1..20: mol_type = other RNA
tggggggtgccacctagtgg

SEQ ID NO: 4743 - DNA, 30 bp, synthetic construct
  source 1..30: mol_type = other DNA
  modified_base 1..30: mod_base = OTHER; note = Phosphorothioate linkage
  misc_feature 1..10: note = DNA
  modified_base 1..10: mod_base = OTHER; note = Phosphorothioate linkage
  modified_base 11..15: mod_base = OTHER; note = 2'-O-(2-methoxyethyl) ribonucleotide
  modified_base 16: mod_base = OTHER; note = locked nucleic acid
  modified_base 17..18: mod_base = OTHER; note = 2'-O-(2-methoxyethyl) ribonucleotide
  modified_base 19: mod_base = OTHER; note = locked nucleic acid
  modified_base 20..21: mod_base = OTHER; note = 2'-O-(2-methoxyethyl) ribonucleotide
  modified_base 22: mod_base = OTHER; note = locked nucleic acid
  modified_base 23..24: mod_base = OTHER; note = 2'-O-(2-methoxyethyl) ribonucleotide
  modified_base 25: mod_base = OTHER; note = locked nucleic acid
  modified_base 26..30: mod_base = OTHER; note = 2'-O-(2-methoxyethyl) ribonucleotide
ttttttttttggacttgggagtggtgactg

SEQ ID NO: 4744 - DNA, 30 bp, synthetic construct; identical to SEQ ID NO: 4743
  source 1..30: mol_type = other DNA
  misc_feature 1..10: note = DNA
  modified_base 1..29: mod_base = OTHER; note = Phosphorothioate linkage
  modified_base 11..15: mod_base = OTHER; note = 2'-O-(2-methoxyethyl) ribonucleotide
  modified_base 16: mod_base = OTHER; note = locked nucleic acid
  modified_base 17..18: mod_base = OTHER; note = 2'-O-(2-methoxyethyl) ribonucleotide
  modified_base 19: mod_base = OTHER; note = locked nucleic acid
  modified_base 20..21: mod_base = OTHER; note = 2'-O-(2-methoxyethyl) ribonucleotide
  modified_base 22: mod_base = OTHER; note = locked nucleic acid
  modified_base 23..24: mod_base = OTHER; note = 2'-O-(2-methoxyethyl) ribonucleotide
  modified_base 25: mod_base = OTHER; note = locked nucleic acid
  modified_base 26..30: mod_base = OTHER; note = 2'-O-(2-methoxyethyl) ribonucleotide

SEQ ID NO: 4745 - DNA, 20 bp, synthetic construct
  source 1..20: mol_type = other DNA
  modified_base 1..20: mod_base = OTHER; note = Phosphorothioate linkage
  modified_base 1..5: mod_base = OTHER; note = 2'-O-(2-methoxyethyl) ribonucleotide
  misc_feature 6..15: note = DNA
  modified_base 16..20: mod_base = OTHER; note = 2'-O-(2-methoxyethyl) ribonucleotide
  modified_base 6..7: mod_base = OTHER; note = 5-methyl cytidine
  modified_base 9..10: mod_base = OTHER; note = 5-methyl cytidine
gggtgccacctagtggaaga

SEQ ID NO: 4746 - DNA, 20 bp, synthetic construct
  source 1..20: mol_type = other DNA
  modified_base 1..20: mod_base = OTHER; note = Phosphorothioate linkage
  modified_base 1..5: mod_base = OTHER; note = 2'-O-(2-methoxyethyl) ribonucleotide
  misc_feature 6..15: note = DNA
  modified_base 16..20: mod_base = OTHER; note = 2'-O-(2-methoxyethyl) ribonucleotide
  modified_base 10..11: mod_base = OTHER; note = 5-methyl cytidine
  modified_base 13..14: mod_base = OTHER; note = 5-methyl cytidine
tggggggtgccacctagtgg

SEQ ID NO: 4747 - DNA, 20 bp, synthetic construct
  source 1..20: mol_type = other DNA
  modified_base 1..20: mod_base = OTHER; note = Phosphorothioate linkage
  modified_base 1..5: mod_base = OTHER; note = 2'-O-(2-methoxyethyl) ribonucleotide
  misc_feature 6..15: note = DNA
  modified_base 16..20: mod_base = OTHER; note = 2'-O-(2-methoxyethyl) ribonucleotide
  modified_base 2: mod_base = OTHER; note = 5-methyl cytidine
  modified_base 17..18: mod_base = OTHER; note = 5-methyl cytidine
  modified_base 1..5: mod_base = OTHER; note = 2'-O-(2-methoxyethyl) ribonucleotide
  misc_feature 6..15: note = DNA
  modified_base 16..20: mod_base = OTHER; note = 2'-O-(2-methoxyethyl) ribonucleotide
  modified_base 6..7: mod_base = OTHER; note = 5-methyl cytidine
  modified_base 20: mod_base = OTHER; note = 5-methyl cytidine
tcggagttggggggtgccac

SEQ ID NO: 4748 - DNA, 20 bp, synthetic construct
  source 1..20: mol_type = other DNA
  modified_base 1..20: mod_base = OTHER; note = Phosphorothioate linkage
  modified_base 1..5: mod_base = OTHER; note = 2'-O-(2-methoxyethyl) ribonucleotide
  misc_feature 6..15: note = DNA
  modified_base 16..20: mod_base = OTHER; note = 2'-O-(2-methoxyethyl) ribonucleotide
  modified_base 2: mod_base = OTHER; note = 5-methyl cytidine
  modified_base 17..18: mod_base = OTHER; note = 5-methyl cytidine
ggcactcggagttggggggt

SEQ ID NO: 4749 - DNA, 20 bp, synthetic construct
  source 1..20: mol_type = other DNA
  modified_base 1..20: mod_base = OTHER; note = Phosphorothioate linkage
  modified_base 1..5: mod_base = OTHER; note = 2'-O-(2-methoxyethyl) ribonucleotide
  misc_feature 6..15: note = DNA
  modified_base 16..20: mod_base = OTHER; note = 2'-O-(2-methoxyethyl) ribonucleotide
  modified_base 2: mod_base = OTHER; note = 5-methyl cytidine
  modified_base 17..18: mod_base = OTHER; note = 5-methyl cytidine
tcctctccccttggcactcg

SEQ ID NO: 4750 - DNA, 20 bp, synthetic construct
  source 1..20: mol_type = other DNA
  modified_base 1..20: mod_base = OTHER; note = Phosphorothioate linkage
  modified_base 1..5: mod_base = OTHER; note = 2'-O-(2-methoxyethyl) ribonucleotide
  misc_feature 6..15: note = DNA
  modified_base 16..20: mod_base = OTHER; note = 2'-O-(2-methoxyethyl) ribonucleotide
  modified_base 7..8: mod_base = OTHER; note = 5-methyl cytidine
  modified_base 10: mod_base = OTHER; note = 5-methyl cytidine
  modified_base 12..15: mod_base = OTHER; note = 5-methyl cytidine
  modified_base 20: mod_base = OTHER; note = 5-methyl cytidine
gaatttcctctccccttggc

SEQ ID NO: 4751 - DNA, 20 bp, synthetic construct
  source 1..20: mol_type = other DNA
  modified_base 1..20: mod_base = OTHER; note = Phosphorothioate linkage
  modified_base 1..5: mod_base = OTHER; note = 2'-O-(2-methoxyethyl) ribonucleotide
  misc_feature 6..15: note = DNA
  modified_base 16..20: mod_base = OTHER; note = 2'-O-(2-methoxyethyl) ribonucleotide
  modified_base 13..14: mod_base = OTHER; note = 5-methyl cytidine
  modified_base 16: mod_base = OTHER; note = 5-methyl cytidine
  modified_base 18..20: mod_base = OTHER; note = 5-methyl cytidine
ttttgggaatttcctctccc

SEQ ID NO: 4752 - DNA, 20 bp, synthetic construct
  source 1..20: mol_type = other DNA
  modified_base 1..20: mod_base = OTHER; note = Phosphorothioate linkage
  modified_base 1..5: mod_base = OTHER; note = 2'-O-(2-methoxyethyl) ribonucleotide
  misc_feature 6..15: note = DNA
  modified_base 16..20: mod_base = OTHER; note = 2'-O-(2-methoxyethyl) ribonucleotide
  modified_base 2: mod_base = OTHER; note = 5-methyl cytidine
  modified_base 4..7: mod_base = OTHER; note = 5-methyl cytidine
  modified_base 20: mod_base = OTHER; note = 5-methyl cytidine
gctccccttttgggaatttc

SEQ ID NO: 4753 - DNA, 20 bp, synthetic construct
  source 1..20: mol_type = other DNA
  modified_base 1..20: mod_base = OTHER; note = Phosphorothioate linkage
  modified_base 1..5: mod_base = OTHER; note = 2'-O-(2-methoxyethyl) ribonucleotide
  misc_feature 6..15: note = DNA
  modified_base 16..20: mod_base = OTHER; note = 2'-O-(2-methoxyethyl) ribonucleotide
  modified_base 6..7: mod_base = OTHER; note = 5-methyl cytidine
  modified_base 12: mod_base = OTHER; note = 5-methyl cytidine
  modified_base 15: mod_base = OTHER; note = 5-methyl cytidine
  modified_base 17: mod_base = OTHER; note = 5-methyl cytidine
tgagaccttggcttctcgaa

SEQ ID NO: 4754 - DNA, 20 bp, synthetic construct
  source 1..20: mol_type = other DNA
  modified_base 1..20: mod_base = OTHER; note = Phosphorothioate linkage
  modified_base 1..5: mod_base = OTHER; note = 2'-O-(2-methoxyethyl) ribonucleotide
  misc_feature 6..15: note = DNA
  modified_base 16..20: mod_base = OTHER; note = 2'-O-(2-methoxyethyl) ribonucleotide
  modified_base 7: mod_base = OTHER; note = 5-methyl cytidine
  modified_base 12..13: mod_base = OTHER; note = 5-methyl cytidine
  modified_base 19..20: mod_base = OTHER; note = 5-methyl cytidine
tgggaacgagacctgagacc

SEQ ID NO: 4755 - DNA, 20 bp, synthetic construct
  source 1..20: mol_type = other DNA
  modified_base 1..20: mod_base = OTHER; note = Phosphorothioate linkage
  modified_base 1..5: mod_base = OTHER; note = 2'-O-(2-methoxyethyl) ribonucleotide
  misc_feature 6..15: note = DNA
  modified_base 16..20: mod_base = OTHER; note = 2'-O-(2-methoxyethyl) ribonucleotide
  modified_base 1: mod_base = OTHER; note = 5-methyl cytidine
  modified_base 7..8: mod_base = OTHER; note = 5-methyl cytidine
  modified_base 15: mod_base = OTHER; note = 5-methyl cytidine
  modified_base 20: mod_base = OTHER; note = 5-methyl cytidine
cgagggcctgggaacgagac

SEQ ID NO: 4756 - DNA, 20 bp, synthetic construct
  source 1..20: mol_type = other DNA
  modified_base 1..20: mod_base = OTHER; note = Phosphorothioate linkage
  modified_base 1..5: mod_base = OTHER; note = 2'-O-(2-methoxyethyl) ribonucleotide
  misc_feature 6..15: note = DNA
  modified_base 16..20: mod_base = OTHER; note = 2'-O-(2-methoxyethyl) ribonucleotide
  modified_base 1: mod_base = OTHER; note = 5-methyl cytidine
  modified_base 3: mod_base = OTHER; note = 5-methyl cytidine
  modified_base 5..6: mod_base = OTHER; note = 5-methyl cytidine
ctctcctggtggtggtgggt

SEQ ID NO: 4757 - DNA, 20 bp, synthetic construct
  source 1..20: mol_type = other DNA
  modified_base 1..20: mod_base = OTHER; note = Phosphorothioate linkage
  modified_base 1..5: mod_base = OTHER; note = 2'-O-(2-methoxyethyl) ribonucleotide
  misc_feature 6..15: note = DNA
  modified_base 16..20: mod_base = OTHER; note = 2'-O-(2-methoxyethyl) ribonucleotide
  modified_base 2..5: mod_base = OTHER; note = 5-methyl cytidine
  modified_base 7: mod_base = OTHER; note = 5-methyl cytidine
  modified_base 9..10: mod_base = OTHER; note = 5-methyl cytidine
tcccctctcctggtggtggt

SEQ ID NO: 4758 - DNA, 20 bp, synthetic construct
  source 1..20: mol_type = other DNA
  modified_base 1..20: mod_base = OTHER; note = Phosphorothioate linkage
  modified_base 1..5: mod_base = OTHER; note = 2'-O-(2-methoxyethyl) ribonucleotide
  misc_feature 6..15: note = DNA
  modified_base 16..20: mod_base = OTHER; note = 2'-O-(2-methoxyethyl) ribonucleotide
  modified_base 3: mod_base = OTHER; note = 5-methyl cytidine
  modified_base 6..9: mod_base = OTHER; note = 5-methyl cytidine
  modified_base 11: mod_base = OTHER; note = 5-methyl cytidine
  modified_base 13..14: mod_base = OTHER; note = 5-methyl cytidine
ttcttcccctctcctggtgg

SEQ ID NO: 4759 - DNA, 20 bp, synthetic construct
  source 1..20: mol_type = other DNA
  modified_base 1..20: mod_base = OTHER; note = Phosphorothioate linkage
  modified_base 1..5: mod_base = OTHER; note = 2'-O-(2-methoxyethyl) ribonucleotide
  misc_feature 6..15: note = DNA
  modified_base 16..20: mod_base = OTHER; note = 2'-O-(2-methoxyethyl) ribonucleotide
  modified_base 2: mod_base = OTHER; note = 5-methyl cytidine
  modified_base 6: mod_base = OTHER; note = 5-methyl cytidine
  modified_base 9: mod_base = OTHER; note = 5-methyl cytidine
  modified_base 12..15: mod_base = OTHER; note = 5-methyl cytidine
  modified_base 17: mod_base = OTHER; note = 5-methyl cytidine
  modified_base 19..20: mod_base = OTHER; note = 5-methyl cytidine
gctggcttcttcccctctcc

SEQ ID NO: 4760 - DNA, 20 bp, synthetic construct
  source 1..20: mol_type = other DNA
  modified_base 1..20: mod_base = OTHER; note = Phosphorothioate linkage
  modified_base 1..5: mod_base = OTHER; note = 2'-O-(2-methoxyethyl) ribonucleotide
  misc_feature 6..15: note = DNA
  modified_base 16..20: mod_base = OTHER; note = 2'-O-(2-methoxyethyl) ribonucleotide
  modified_base 1: mod_base = OTHER; note = 5-methyl cytidine
  modified_base 5: mod_base = OTHER; note = 5-methyl cytidine
  modified_base 14: mod_base = OTHER; note = 5-methyl cytidine
  modified_base 18: mod_base = OTHER; note = 5-methyl cytidine
ctgtcggtaggtgctggctt

SEQ ID NO: 4761 - DNA, 20 bp, synthetic construct
  source 1..20: mol_type = other DNA
  modified_base 1..20: mod_base = OTHER; note = Phosphorothioate linkage
  modified_base 1..5: mod_base = OTHER; note = 2'-O-(2-methoxyethyl) ribonucleotide
  misc_feature 6..15: note = DNA
  modified_base 16..20: mod_base = OTHER; note = 2'-O-(2-methoxyethyl) ribonucleotide
  modified_base 3: mod_base = OTHER; note = 5-methyl cytidine
  modified_base 5..6: mod_base = OTHER; note = 5-methyl cytidine
  modified_base 8..11: mod_base = OTHER; note = 5-methyl cytidine
  modified_base 15: mod_base = OTHER; note = 5-methyl cytidine
agctccacccctgtcggtag

SEQ ID NO: 4762 - DNA, 20 bp, synthetic construct
  source 1..20: mol_type = other DNA
  modified_base 1..20: mod_base = OTHER; note = Phosphorothioate linkage
  modified_base 1..5: mod_base = OTHER; note = 2'-O-(2-methoxyethyl) ribonucleotide
  misc_feature 6..15: note = DNA
  modified_base 16..20: mod_base = OTHER; note = 2'-O-(2-methoxyethyl) ribonucleotide
  modified_base 2..4: mod_base = OTHER; note = 5-methyl cytidine
  modified_base 7: mod_base = OTHER; note = 5-methyl cytidine
  modified_base 9..10: mod_base = OTHER; note = 5-methyl cytidine
  modified_base 12..15: mod_base = OTHER; note = 5-methyl cytidine
  modified_base 19: mod_base = OTHER; note = 5-methyl cytidine
acccagctccacccctgtcg

SEQ ID NO: 4763 - DNA, 20 bp, synthetic construct
  source 1..20: mol_type = other DNA
  modified_base 1..20: mod_base = OTHER; note = Phosphorothioate linkage
  modified_base 1..5: mod_base = OTHER; note = 2'-O-(2-methoxyethyl) ribonucleotide
  misc_feature 6..15: note = DNA
  modified_base 16..20: mod_base = OTHER; note = 2'-O-(2-methoxyethyl) ribonucleotide
  modified_base 1: mod_base = OTHER; note = 5-methyl cytidine
  modified_base 6..8: mod_base = OTHER; note = 5-methyl cytidine
  modified_base 11: mod_base = OTHER; note = 5-methyl cytidine
  modified_base 13..14: mod_base = OTHER; note = 5-methyl cytidine
  modified_base 16..19: mod_base = OTHER; note = 5-methyl cytidine
cttgacccagctccacccct

SEQ ID NO: 4764 - DNA, 20 bp, synthetic construct
  source 1..20: mol_type = other DNA
  modified_base 1..20: mod_base = OTHER; note = Phosphorothioate linkage
  modified_base 1..5: mod_base = OTHER; note = 2'-O-(2-methoxyethyl) ribonucleotide
  misc_feature 6..15: note = DNA
  modified_base 16..20: mod_base = OTHER; note = 2'-O-(2-methoxyethyl) ribonucleotide
  modified_base 6: mod_base = OTHER; note = 5-methyl cytidine
  modified_base 8: mod_base = OTHER; note = 5-methyl cytidine
  modified_base 11..12: mod_base = OTHER; note = 5-methyl cytidine
  modified_base 18: mod_base = OTHER; note = 5-methyl cytidine
ggagtctcagccggagacaa

SEQ ID NO: 4765 - DNA, 20 bp, synthetic construct
  source 1..20: mol_type = other DNA
  modified_base 1..20: mod_base = OTHER; note = Phosphorothioate linkage
  modified_base 1..5: mod_base = OTHER; note = 2'-O-(2-methoxyethyl) ribonucleotide
  misc_feature 6..15: note = DNA
  modified_base 16..20: mod_base = OTHER; note = 2'-O-(2-methoxyethyl) ribonucleotide
  modified_base 7..10: mod_base = OTHER; note = 5-methyl cytidine
  modified_base 17: mod_base = OTHER; note = 5-methyl cytidine
  modified_base 19: mod_base = OTHER; note = 5-methyl cytidine
gaggttcccctggagtctca

SEQ ID NO: 4766 - DNA, 20 bp, synthetic construct
  source 1..20: mol_type = other DNA
  modified_base 1..20: mod_base = OTHER; note = Phosphorothioate linkage
  modified_base 1..5: mod_base = OTHER; note = 2'-O-(2-methoxyethyl) ribonucleotide
  misc_feature 6..15: note = DNA
  modified_base 16..20: mod_base = OTHER; note = 2'-O-(2-methoxyethyl) ribonucleotide
  modified_base 2: mod_base = OTHER; note = 5-methyl cytidine
  modified_base 11..14: mod_base = OTHER; note = 5-methyl cytidine
gcttgaggttcccctggagt

SEQ ID NO: 4767 - DNA, 20 bp, synthetic construct
  source 1..20: mol_type = other DNA
  modified_base 1..20: mod_base = OTHER; note = Phosphorothioate linkage
  modified_base 1..5: mod_base = OTHER; note = 2'-O-(2-methoxyethyl) ribonucleotide
  misc_feature 6..15: note = DNA
  modified_base 16..20: mod_base = OTHER; note = 2'-O-(2-methoxyethyl) ribonucleotide
  modified_base 6: mod_base = OTHER; note = 5-methyl cytidine
  modified_base 15..18: mod_base = OTHER; note = 5-methyl cytidine
gtgagcttgaggttcccctg

SEQ ID NO: 4768 - DNA, 20 bp, synthetic construct
  source 1..20: mol_type = other DNA
  modified_base 1..20: mod_base = OTHER; note = Phosphorothioate linkage
  modified_base 1..5: mod_base = OTHER; note = 2'-O-(2-methoxyethyl) ribonucleotide
  misc_feature 6..15: note = DNA
  modified_base 16..20: mod_base = OTHER; note = 2'-O-(2-methoxyethyl) ribonucleotide
  modified_base 1: mod_base = OTHER; note = 5-methyl cytidine
  modified_base 3..4: mod_base = OTHER; note = 5-methyl cytidine
  modified_base 9..10: mod_base = OTHER; note = 5-methyl cytidine
  modified_base 18: mod_base = OTHER; note = 5-methyl cytidine
cgccagggccatgtgagctt

SEQ ID NO: 4769 - DNA, 20 bp, synthetic construct
  source 1..20: mol_type = other DNA
  modified_base 1..20: mod_base = OTHER; note = Phosphorothioate linkage
  modified_base 1..5: mod_base = OTHER; note = 2'-O-(2-methoxyethyl) ribonucleotide
  misc_feature 6..15: note = DNA
  modified_base 16..20: mod_base = OTHER; note = 2'-O-(2-methoxyethyl) ribonucleotide
  modified_base 3..5: mod_base = OTHER; note = 5-methyl cytidine
  modified_base 7..8: mod_base = OTHER; note = 5-methyl cytidine
  modified_base 13..14: mod_base = OTHER; note = 5-methyl cytidine
ggcccgccagggccatgtga

SEQ ID NO: 4770 - DNA, 20 bp, synthetic construct
  source 1..20: mol_type = other DNA
  modified_base 1..20: mod_base = OTHER; note = Phosphorothioate linkage
  modified_base 1..5: mod_base = OTHER; note = 2'-O-(2-methoxyethyl) ribonucleotide
  misc_feature 6..15: note = DNA
  modified_base 16..20: mod_base = OTHER; note = 2'-O-(2-methoxyethyl) ribonucleotide
  modified_base 1: mod_base = OTHER; note = 5-methyl cytidine
  modified_base 7..9: mod_base = OTHER; note = 5-methyl cytidine
  modified_base 11..12: mod_base = OTHER; note = 5-methyl cytidine
  modified_base 17..18: mod_base = OTHER; note = 5-methyl cytidine
caggggcccgccagggccat

SEQ ID NO: 4771 - DNA, 20 bp, synthetic construct
  source 1..20: mol_type = other DNA
  modified_base 1..20: mod_base = OTHER; note = Phosphorothioate linkage
  modified_base 1..5: mod_base = OTHER; note = 2'-O-(2-methoxyethyl) ribonucleotide
  misc_feature 6..15: note = DNA
  modified_base 16..20: mod_base = OTHER; note = 2'-O-(2-methoxyethyl) ribonucleotide
  modified_base 3..5: mod_base = OTHER; note = 5-methyl cytidine
  modified_base 11..13: mod_base = OTHER; note = 5-methyl cytidine
  modified_base 15..16: mod_base = OTHER; note = 5-methyl cytidine
tgcccaggggcccgccaggg

SEQ ID NO: 4772 - DNA, 20 bp, synthetic construct
  source 1..20: mol_type = other DNA
  modified_base 1..20: mod_base = OTHER; note = Phosphorothioate linkage
  modified_base 1..5: mod_base = OTHER; note = 2'-O-(2-methoxyethyl) ribonucleotide
  misc_feature 6..15: note = DNA
  modified_base 16..20: mod_base = OTHER; note = 2'-O-(2-methoxyethyl) ribonucleotide
  modified_base 3: mod_base = OTHER; note = 5-methyl cytidine
  modified_base 5..6: mod_base = OTHER; note = 5-methyl cytidine
  modified_base 9..11: mod_base = OTHER; note = 5-methyl cytidine
  modified_base 17..19: mod_base = OTHER; note = 5-methyl cytidine
tgctcctgcccaggggcccg

SEQ ID NO: 4773 - DNA, 20 bp, synthetic construct
  source 1..20: mol_type = other DNA
  modified_base 1..20: mod_base = OTHER; note = Phosphorothioate linkage
  modified_base 1..5: mod_base = OTHER; note = 2'-O-(2-methoxyethyl) ribonucleotide
  misc_feature 6..15: note = DNA
  modified_base 16..20: mod_base = OTHER; note = 2'-O-(2-methoxyethyl) ribonucleotide
  modified_base 18: mod_base = OTHER; note = 5-methyl cytidine
ggatgggttaaggaaggcga

SEQ ID NO: 4774 - DNA, 20 bp, synthetic construct
  source 1..20: mol_type = other DNA
  modified_base 1..20: mod_base = OTHER; note = Phosphorothioate linkage
  modified_base 1..5: mod_base = OTHER; note = 2'-O-(2-methoxyethyl) ribonucleotide
  misc_feature 6..15: note = DNA
  modified_base 16..20: mod_base = OTHER; note = 2'-O-(2-methoxyethyl) ribonucleotide
  modified_base 4: mod_base = OTHER; note = 5-methyl cytidine
  modified_base 6..7: mod_base = OTHER; note = 5-methyl cytidine
  modified_base 10: mod_base = OTHER; note = 5-methyl cytidine
aggcgcctgcaggatgggtt

SEQ ID NO: 4775 - DNA, 20 bp, synthetic construct
  source 1..20: mol_type = other DNA
  modified_base 1..20: mod_base = OTHER; note = Phosphorothioate linkage
  modified_base 1..5: mod_base = OTHER; note = 2'-O-(2-methoxyethyl) ribonucleotide
  misc_feature 6..15: note = DNA
  modified_base 16..20: mod_base = OTHER; note = 2'-O-(2-methoxyethyl) ribonucleotide
  modified_base 1..4: mod_base = OTHER; note = 5-methyl cytidine
  modified_base 8: mod_base = OTHER; note = 5-methyl cytidine
  modified_base 10..11: mod_base = OTHER; note = 5-methyl cytidine
  modified_base 14: mod_base = OTHER; note = 5-methyl cytidine
ccccaggcgcctgcaggatg

SEQ ID NO: 4776 - DNA, 20 bp, synthetic construct
  source 1..20: mol_type = other DNA
  modified_base 1..20: mod_base = OTHER; note = Phosphorothioate linkage
  modified_base 1..5: mod_base = OTHER; note = 2'-O-(2-methoxyethyl) ribonucleotide
  misc_feature 6..15: note = DNA
  modified_base 16..20: mod_base = OTHER; note = 2'-O-(2-methoxyethyl) ribonucleotide
  modified_base 3: mod_base = OTHER; note = 5-methyl cytidine
  modified_base 5..9: mod_base = OTHER; note = 5-methyl cytidine
  modified_base 13: mod_base = OTHER; note = 5-methyl cytidine
  modified_base 15..16: mod_base = OTHER; note = 5-methyl cytidine
  modified_base 19: mod_base = OTHER; note = 5-methyl cytidine
aactcccccaggcgcctgca

SEQ ID NO: 4777 - DNA, 20 bp, synthetic construct
  source 1..20: mol_type = other DNA
  modified_base 1..20: mod_base = OTHER; note = Phosphorothioate linkage
  modified_base 1..5: mod_base = OTHER; note = 2'-O-(2-methoxyethyl) ribonucleotide
  misc_feature 6..15: note = DNA
  modified_base 16..20: mod_base = OTHER; note = 2'-O-(2-methoxyethyl) ribonucleotide
  modified_base 2: mod_base = OTHER; note = 5-methyl cytidine
  modified_base 4: mod_base = OTHER; note = 5-methyl cytidine
  modified_base 8: mod_base = OTHER; note = 5-methyl cytidine
  modified_base 11: mod_base = OTHER; note = 5-methyl cytidine
  modified_base 13: mod_base = OTHER; note = 5-methyl cytidine
  modified_base 17: mod_base = OTHER; note = 5-methyl cytidine
gcgctatcatctctagcaaa

SEQ ID NO: 4778 - DNA, 20 bp, synthetic construct
  source 1..20: mol_type = other DNA
  modified_base 1..20: mod_base = OTHER; note = Phosphorothioate linkage
  modified_base 1..5: mod_base = OTHER; note = 2'-O-(2-methoxyethyl) ribonucleotide
  misc_feature 6..15: note = DNA
  modified_base 16..20: mod_base = OTHER; note = 2'-O-(2-methoxyethyl) ribonucleotide
  modified_base 2: mod_base = OTHER; note = 5-methyl cytidine
  modified_base 5..6: mod_base = OTHER; note = 5-methyl cytidine
  modified_base 10..12: mod_base = OTHER; note = 5-methyl cytidine
  modified_base 16..18: mod_base = OTHER; note = 5-methyl cytidine
tctgcctggcccaggccctt

SEQ ID NO: 4779 - DNA, 20 bp, synthetic construct
  source 1..20: mol_type = other DNA
  modified_base 1..20: mod_base = OTHER; note = Phosphorothioate linkage
  modified_base 1..5: mod_base = OTHER; note = 2'-O-(2-methoxyethyl) ribonucleotide
  misc_feature 6..15: note = DNA
  modified_base 16..20: mod_base = OTHER; note = 2'-O-(2-methoxyethyl) ribonucleotide
  modified_base 3..4: mod_base = OTHER; note = 5-methyl cytidine
  modified_base 7: mod_base = OTHER; note = 5-methyl cytidine
  modified_base 9: mod_base = OTHER; note = 5-methyl cytidine
  modified_base 12..13: mod_base = OTHER; note = 5-methyl cytidine
  modified_base 16..19: mod_base = OTHER; note = 5-methyl cytidine
atccatctctgcctggccca

SEQ ID NO: 4780 - DNA, 20 bp, synthetic construct
  source 1..20: mol_type = other DNA
  modified_base 1..20: mod_base = OTHER; note = Phosphorothioate linkage
  modified_base 1..5: mod_base = OTHER; note = 2'-O-(2-methoxyethyl) ribonucleotide
  misc_feature 6..15: note = DNA
  modified_base 16..20: mod_base = OTHER; note = 2'-O-(2-methoxyethyl) ribonucleotide
  modified_base 2: mod_base = OTHER; note = 5-methyl cytidine
  modified_base 4..6: mod_base = OTHER; note = 5-methyl cytidine
  modified_base 9: mod_base = OTHER; note = 5-methyl cytidine
  modified_base 12..13: mod_base = OTHER; note = 5-methyl cytidine
  modified_base 16: mod_base = OTHER; note = 5-methyl cytidine
  modified_base 18: mod_base = OTHER; note = 5-methyl cytidine
tctcccatcatccatctctg

SEQ ID NO: 4781 - DNA, 20 bp, synthetic construct
  source 1..20: mol_type = other DNA
  modified_base 1..20: mod_base = OTHER; note = Phosphorothioate linkage
  modified_base 1..5: mod_base = OTHER; note = 2'-O-(2-methoxyethyl) ribonucleotide
  misc_feature 6..15: note = DNA
  modified_base 16..20: mod_base = OTHER; note = 2'-O-(2-methoxyethyl) ribonucleotide
  modified_base 1..3: mod_base = OTHER; note = 5-methyl cytidine
  modified_base 6: mod_base = OTHER; note = 5-methyl cytidine
  modified_base 8..10: mod_base = OTHER; note = 5-methyl cytidine
  modified_base 13: mod_base = OTHER; note = 5-methyl cytidine
  modified_base 16..17: mod_base = OTHER; note = 5-methyl cytidine
  modified_base 20: mod_base = OTHER; note = 5-methyl cytidine
cccatctcccatcatccatc

SEQ ID NO: 4782 - DNA, 20 bp, synthetic construct
  source 1..20: mol_type = other DNA
  modified_base 1..20: mod_base = OTHER; note = Phosphorothioate linkage
  modified_base 1..5: mod_base = OTHER; note = 2'-O-(2-methoxyethyl) ribonucleotide
  misc_feature 6..15: note = DNA
  modified_base 16..20: mod_base = OTHER; note = 2'-O-(2-methoxyethyl) ribonucleotide
  modified_base 2: mod_base = OTHER; note = 5-methyl cytidine
  modified_base 4: mod_base = OTHER; note = 5-methyl cytidine
  modified_base 6..7: mod_base = OTHER; note = 5-methyl cytidine
  modified_base 11..13: mod_base = OTHER; note = 5-methyl cytidine
  modified_base 16: mod_base = OTHER; note = 5-methyl cytidine
  modified_base 18..20: mod_base = OTHER; note = 5-methyl cytidine
tctctcctggcccatctccc

SEQ ID NO: 4783 - DNA, 20 bp, synthetic construct
  source 1..20: mol_type = other DNA
  modified_base 1..20: mod_base = OTHER; note = Phosphorothioate linkage
  modified_base 1..5: mod_base = OTHER; note = 2'-O-(2-methoxyethyl) ribonucleotide
  misc_feature 6..15: note = DNA
  modified_base 16..20: mod_base = OTHER; note = 2'-O-(2-methoxyethyl) ribonucleotide
  modified_base 4..5: mod_base = OTHER; note = 5-methyl cytidine
  modified_base 7: mod_base = OTHER; note = 5-methyl cytidine
  modified_base 9..10: mod_base = OTHER; note = 5-methyl cytidine
  modified_base 12: mod_base = OTHER; note = 5-methyl cytidine
  modified_base 14: mod_base = OTHER; note = 5-methyl cytidine
  modified_base 16..17: mod_base = OTHER; note = 5-methyl cytidine
gggcctctcctctctcctgg

SEQ ID NO: 4784 - DNA, 20 bp, synthetic construct
  source 1..20: mol_type = other DNA
  modified_base 1..20: mod_base = OTHER; note = Phosphorothioate linkage
  modified_base 1..5: mod_base = OTHER; note = 2'-O-(2-methoxyethyl) ribonucleotide
  misc_feature 6..15: note = DNA
  modified_base 16..20: mod_base = OTHER; note = 2'-O-(2-methoxyethyl) ribonucleotide
  modified_base 2..4: mod_base = OTHER; note = 5-methyl cytidine
  modified_base 9..10: mod_base = OTHER; note = 5-methyl cytidine
  modified_base 12: mod_base = OTHER; note = 5-methyl cytidine
  modified_base 14..15: mod_base = OTHER; note = 5-methyl cytidine
  modified_base 17: mod_base = OTHER; note = 5-methyl cytidine
  modified_base 19: mod_base = OTHER; note = 5-methyl cytidine
tccctgggcctctcctctct

SEQ ID NO: 4785 - DNA, 20 bp, synthetic construct
  source 1..20: mol_type = other DNA
  modified_base 1..20: mod_base = OTHER; note = Phosphorothioate linkage
  modified_base 1..5: mod_base = OTHER; note = 2'-O-(2-methoxyethyl) ribonucleotide
  misc_feature 6..15: note = DNA
  modified_base 16..20: mod_base = OTHER; note = 2'-O-(2-methoxyethyl) ribonucleotide
  modified_base 2: mod_base = OTHER; note = 5-methyl cytidine
  modified_base 6..8: mod_base = OTHER; note = 5-methyl cytidine
  modified_base 13..14: mod_base = OTHER; note = 5-methyl cytidine
  modified_base 16: mod_base = OTHER; note = 5-methyl cytidine
  modified_base 18..19: mod_base = OTHER; note = 5-methyl cytidine
gctttccctgggcctctcct

SEQ ID NO: 4786 - DNA, 20 bp, synthetic construct
  source 1..20: mol_type = other DNA
  modified_base 1..20: mod_base = OTHER; note = Phosphorothioate linkage
  modified_base 1..5: mod_base = OTHER; note = 2'-O-(2-methoxyethyl) ribonucleotide
  misc_feature 6..15: note = DNA
  modified_base 16..20: mod_base = OTHER; note = 2'-O-(2-methoxyethyl) ribonucleotide
  modified_base 4: mod_base = OTHER; note = 5-methyl cytidine
  modified_base 8: mod_base = OTHER; note = 5-methyl cytidine
  modified_base 10: mod_base = OTHER; note = 5-methyl cytidine
  modified_base 13..14: mod_base = OTHER; note = 5-methyl cytidine
  modified_base 18..19: mod_base = OTHER; note = 5-methyl cytidine
gtgcagacactgccgttcct

SEQ ID NO: 4787 - DNA, 20 bp, synthetic construct
  source 1..20: mol_type = other DNA
  modified_base 1..20: mod_base = OTHER; note = Phosphorothioate linkage
  modified_base 1..5: mod_base = OTHER; note = 2'-O-(2-methoxyethyl) ribonucleotide
  misc_feature 6..15: note = DNA
  modified_base 16..20: mod_base = OTHER; note = 2'-O-(2-methoxyethyl) ribonucleotide
  modified_base 1..4: mod_base = OTHER; note = 5-methyl cytidine
  modified_base 9: mod_base = OTHER; note = 5-methyl cytidine
  modified_base 13: mod_base = OTHER; note = 5-methyl cytidine
  modified_base 15: mod_base = OTHER; note = 5-methyl cytidine
  modified_base 18..19: mod_base = OTHER; note = 5-methyl cytidine
cccctgtgcagacactgccg

SEQ ID NO: 4788 - DNA, 20 bp, synthetic construct
  source 1..20: mol_type = other DNA
  modified_base 1..20: mod_base = OTHER; note = Phosphorothioate linkage
  modified_base 1..5: mod_base = OTHER; note = 2'-O-(2-methoxyethyl) ribonucleotide
  misc_feature 6..15: note = DNA
  modified_base 16..20: mod_base = OTHER; note = 2'-O-(2-methoxyethyl) ribonucleotide
  modified_base 1..2: mod_base = OTHER; note = 5-methyl cytidine
  modified_base 5..8: mod_base = OTHER; note = 5-methyl cytidine
  modified_base 13: mod_base = OTHER; note = 5-methyl cytidine
  modified_base 17: mod_base = OTHER; note = 5-methyl cytidine
  modified_base 19: mod_base = OTHER; note = 5-methyl cytidine
ccatcccctgtgcagacact

SEQ ID NO: 4789 - DNA, 20 bp, synthetic construct
  source 1..20: mol_type = other DNA
  modified_base 1..20: mod_base = OTHER; note = Phosphorothioate linkage
  modified_base 1..5: mod_base = OTHER; note = 2'-O-(2-methoxyethyl) ribonucleotide
  misc_feature 6..15: note = DNA
  modified_base 16..20: mod_base = OTHER; note = 2'-O-(2-methoxyethyl) ribonucleotide
  modified_base 4: mod_base = OTHER; note = 5-methyl cytidine
  modified_base 6..7: mod_base = OTHER; note = 5-methyl cytidine
  modified_base 10..13: mod_base = OTHER; note = 5-methyl cytidine
  modified_base 18: mod_base = OTHER; note = 5-methyl cytidine
agtctccatcccctgtgcag

SEQ ID NO: 4790 - DNA, 20 bp, synthetic construct
  source 1..20: mol_type = other DNA
  modified_base 1..20: mod_base = OTHER; note = Phosphorothioate linkage
  modified_base 1..5: mod_base = OTHER; note = 2'-O-(2-methoxyethyl) ribonucleotide
  misc_feature 6..15: note = DNA
  modified_base 16..20: mod_base = OTHER; note = 2'-O-(2-methoxyethyl) ribonucleotide
  modified_base 1: mod_base = OTHER; note = 5-methyl cytidine
  modified_base 5: mod_base = OTHER; note = 5-methyl cytidine
  modified_base 7: mod_base = OTHER; note = 5-methyl cytidine
  modified_base 11: mod_base = OTHER; note = 5-methyl cytidine
  modified_base 14: mod_base = OTHER; note = 5-methyl cytidine
  modified_base 17: mod_base = OTHER; note = 5-methyl cytidine
cttgctcaggctgcagcagt

SEQ ID NO: 4791 - DNA, 20 bp, synthetic construct
  source 1..20: mol_type = other DNA
  modified_base 1..20: mod_base = OTHER; note = Phosphorothioate linkage
  modified_base 1..5: mod_base = OTHER; note = 2'-O-(2-methoxyethyl) ribonucleotide
  misc_feature 6..15: note = DNA
  modified_base 16..20: mod_base = OTHER; note = 2'-O-(2-methoxyethyl) ribonucleotide
  modified_base 4..5: mod_base = OTHER; note = 5-methyl cytidine
  modified_base 9: mod_base = OTHER; note = 5-methyl cytidine
  modified_base 11: mod_base = OTHER; note = 5-methyl cytidine
  modified_base 15: mod_base = OTHER; note = 5-methyl cytidine
  modified_base 18: mod_base = OTHER; note = 5-methyl cytidine
gttccttgctcaggctgcag

SEQ ID NO: 4792 - DNA, 20 bp, synthetic construct
  source 1..20: mol_type = other DNA
  modified_base 1..20: mod_base = OTHER; note = Phosphorothioate linkage
  modified_base 1..5: mod_base = OTHER; note = 2'-O-(2-methoxyethyl) ribonucleotide
  misc_feature 6..15: note = DNA
  modified_base 16..20: mod_base = OTHER; note = 2'-O-(2-methoxyethyl) ribonucleotide
  modified_base 2: mod_base = OTHER; note = 5-methyl cytidine
  modified_base 5: mod_base = OTHER; note = 5-methyl cytidine
  modified_base 7..8: mod_base = OTHER; note = 5-methyl cytidine
  modified_base 13..14: mod_base = OTHER; note = 5-methyl cytidine
  modified_base 18: mod_base = OTHER; note = 5-methyl cytidine
  modified_base 20: mod_base = OTHER; note = 5-methyl cytidine
tcagctccagttccttgctc

SEQ ID NO: 4793 - RNA, 20 nt, synthetic construct
  source 1..20: mol_type = other RNA
  modified_base 1..20: mod_base = OTHER; note = Phosphorothioate linkage
  modified_base 1..5: mod_base = OTHER; note = 2'-O-(2-methoxyethyl) ribonucleotide
  modified_base 6: mod_base = OTHER; note = locked nucleic acid
  modified_base 7..8: mod_base = OTHER; note = 2'-O-(2-methoxyethyl) ribonucleotide
  modified_base 9: mod_base = OTHER; note = locked nucleic acid
  modified_base 10..11: mod_base = OTHER; note = 2'-O-(2-methoxyethyl) ribonucleotide
  modified_base 12: mod_base = OTHER; note = locked nucleic acid
  modified_base 13..14: mod_base = OTHER; note = 2'-O-(2-methoxyethyl) ribonucleotide
  modified_base 15: mod_base = OTHER; note = locked nucleic acid
  modified_base 16..20: mod_base = OTHER; note = 2'-O-(2-methoxyethyl) ribonucleotide
  modified_base 6..7: mod_base = OTHER; note = 5-methyl cytidine
  modified_base 9..10: mod_base = OTHER; note = 5-methyl cytidine
gggtgccacctagtggaaga

SEQ ID NO: 4794 - RNA, 20 nt, synthetic construct
  source 1..20: mol_type = other RNA
  modified_base 1..20: mod_base = OTHER; note = Phosphorothioate linkage
  modified_base 1..5: mod_base = OTHER; note = 2'-O-(2-methoxyethyl) ribonucleotide
  modified_base 6: mod_base = OTHER; note = locked nucleic acid
  modified_base 7..8: mod_base = OTHER; note = 2'-O-(2-methoxyethyl) ribonucleotide
  modified_base 9: mod_base = OTHER; note = locked nucleic acid
  modified_base 10..11: mod_base = OTHER; note = 2'-O-(2-methoxyethyl) ribonucleotide
  modified_base 12: mod_base = OTHER; note = locked nucleic acid
  modified_base 13..14: mod_base = OTHER; note = 2'-O-(2-methoxyethyl) ribonucleotide
  modified_base 15: mod_base = OTHER; note = locked nucleic acid
  modified_base 16..20: mod_base = OTHER; note = 2'-O-(2-methoxyethyl) ribonucleotide
  modified_base 10..11: mod_base = OTHER; note = 5-methyl cytidine
  modified_base 13..14: mod_base = OTHER; note = 5-methyl cytidine
tggggggtgccacctagtgg

SEQ ID NO: 4795 - RNA, 20 nt, synthetic construct
  source 1..20: mol_type = other RNA
  modified_base 1..20: mod_base = OTHER; note = Phosphorothioate linkage
  modified_base 1..5: mod_base = OTHER; note = 2'-O-(2-methoxyethyl) ribonucleotide
  modified_base 6: mod_base = OTHER; note = locked nucleic acid
  modified_base 7..8: mod_base = OTHER; note = 2'-O-(2-methoxyethyl) ribonucleotide
  modified_base 9: mod_base = OTHER; note = locked nucleic acid
  modified_base 10..11: mod_base = OTHER; note = 2'-O-(2-methoxyethyl) ribonucleotide
  modified_base 12: mod_base = OTHER; note = locked nucleic acid
  modified_base 13..14: mod_base = OTHER; note = 2'-O-(2-methoxyethyl) ribonucleotide
  modified_base 15: mod_base = OTHER; note = locked nucleic acid
  modified_base 16..20: mod_base = OTHER; note = 2'-O-(2-methoxyethyl) ribonucleotide
  modified_base 2: mod_base = OTHER; note = 5-methyl cytidine
  modified_base 17..18: mod_base = OTHER; note = 5-methyl cytidine
  modified_base 20: mod_base = OTHER; note = 5-methyl cytidine
tcggagttggggggtgccac

SEQ ID NO: 4796 - RNA, 20 nt, synthetic construct
  source 1..20: mol_type = other RNA
  modified_base 1..20: mod_base = OTHER; note = Phosphorothioate linkage
  modified_base 1..5: mod_base = OTHER; note = 2'-O-(2-methoxyethyl) ribonucleotide
  modified_base 6: mod_base = OTHER; note = locked nucleic acid
  modified_base 7..8: mod_base = OTHER; note = 2'-O-(2-methoxyethyl) ribonucleotide
  modified_base 9: mod_base = OTHER; note = locked nucleic acid
  modified_base 10..11: mod_base = OTHER; note = 2'-O-(2-methoxyethyl) ribonucleotide
  modified_base 12: mod_base = OTHER; note = locked nucleic acid
  modified_base 13..14: mod_base = OTHER; note = 2'-O-(2-methoxyethyl) ribonucleotide
  modified_base 15: mod_base = OTHER; note = locked nucleic acid
  modified_base 16..20: mod_base = OTHER; note = 2'-O-(2-methoxyethyl) ribonucleotide
  modified_base 3: mod_base = OTHER; note = 5-methyl cytidine
  modified_base 5: mod_base = OTHER; note = 5-methyl cytidine
  modified_base 7: mod_base = OTHER; note = 5-methyl cytidine
ggcactcggagttggggggt

SEQ ID NO: 4797 - RNA, 20 nt, synthetic construct
  source 1..20: mol_type = other RNA
  modified_base 1..20: mod_base = OTHER; note = Phosphorothioate linkage
  modified_base 1..5: mod_base = OTHER; note = 2'-O-(2-methoxyethyl) ribonucleotide
  modified_base 6: mod_base = OTHER; note = locked nucleic acid
  modified_base 7..8: mod_base = OTHER; note = 2'-O-(2-methoxyethyl) ribonucleotide
  modified_base 9: mod_base = OTHER; note = locked nucleic acid
  modified_base 10..11: mod_base = OTHER; note = 2'-O-(2-methoxyethyl) ribonucleotide
  modified_base 12: mod_base = OTHER; note = locked nucleic acid
  modified_base 13..14: mod_base = OTHER; note = 2'-O-(2-methoxyethyl) ribonucleotide
  modified_base 15: mod_base = OTHER; note = locked nucleic acid
  modified_base 16..20: mod_base = OTHER; note = 2'-O-(2-methoxyethyl) ribonucleotide
  modified_base 2..3: mod_base = OTHER; note = 5-methyl cytidine
  modified_base 5: mod_base = OTHER; note = 5-methyl cytidine
  modified_base 7..10: mod_base = OTHER; note = 5-methyl cytidine
  modified_base 15: mod_base = OTHER; note = 5-methyl cytidine
  modified_base 17: mod_base = OTHER; note = 5-methyl cytidine
  modified_base 19: mod_base = OTHER; note = 5-methyl cytidine
tcctctccccttggcactcg

SEQ ID NO: 4798 - RNA, 20 nt, synthetic construct
  source 1..20: mol_type = other RNA
  modified_base 1..20: mod_base = OTHER; note = Phosphorothioate linkage
  modified_base 1..5: mod_base = OTHER; note = 2'-O-(2-methoxyethyl) ribonucleotide
  modified_base 6: mod_base = OTHER; note = locked nucleic acid
  modified_base 7..8: mod_base = OTHER; note = 2'-O-(2-methoxyethyl) ribonucleotide
  modified_base 9: mod_base = OTHER; note = locked nucleic acid
  modified_base 10..11: mod_base = OTHER; note = 2'-O-(2-methoxyethyl) ribonucleotide
  modified_base 12: mod_base = OTHER; note = locked nucleic acid
  modified_base 13..14: mod_base = OTHER; note = 2'-O-(2-methoxyethyl) ribonucleotide
  modified_base 15: mod_base = OTHER; note = locked nucleic acid
  modified_base 16..20: mod_base = OTHER; note = 2'-O-(2-methoxyethyl) ribonucleotide
  modified_base 7..8: mod_base = OTHER; note = 5-methyl cytidine
  modified_base 10: mod_base = OTHER; note = 5-methyl cytidine
  modified_base 12..15: mod_base = OTHER; note = 5-methyl cytidine
  modified_base 20: mod_base = OTHER; note = 5-methyl cytidine
gaatttcctctccccttggc

SEQ ID NO: 4799 - RNA, 20 nt, synthetic construct
  source 1..20: mol_type = other RNA
  modified_base 1..20: mod_base = OTHER; note = Phosphorothioate linkage
  modified_base 1..5: mod_base = OTHER; note = 2'-O-(2-methoxyethyl) ribonucleotide
  modified_base 6: mod_base = OTHER; note = locked nucleic acid
  modified_base 7..8: mod_base = OTHER; note = 2'-O-(2-methoxyethyl) ribonucleotide
  modified_base 9: mod_base = OTHER; note = locked nucleic acid
  modified_base 10..11: mod_base = OTHER; note = 2'-O-(2-methoxyethyl) ribonucleotide
  modified_base 12: mod_base = OTHER; note = locked nucleic acid
  modified_base 13..14: mod_base = OTHER; note = 2'-O-(2-methoxyethyl) ribonucleotide
  modified_base 15: mod_base = OTHER; note = locked nucleic acid
  modified_base 16..20: mod_base = OTHER; note = 2'-O-(2-methoxyethyl) ribonucleotide
  modified_base 13..14: mod_base = OTHER; note = 5-methyl cytidine
  modified_base 16: mod_base = OTHER; note = 5-methyl cytidine
  modified_base 18..20: mod_base = OTHER; note = 5-methyl cytidine
ttttgggaatttcctctccc

SEQ ID NO: 4800 - RNA, 20 nt, synthetic construct
  source 1..20: mol_type = other RNA
  modified_base 1..20: mod_base = OTHER; note = Phosphorothioate linkage
  modified_base 1..5: mod_base = OTHER; note = 2'-O-(2-methoxyethyl) ribonucleotide
  modified_base 6: mod_base = OTHER; note = locked nucleic acid
  modified_base 7..8: mod_base = OTHER; note = 2'-O-(2-methoxyethyl) ribonucleotide
  modified_base 9: mod_base = OTHER; note = locked nucleic acid
  modified_base 10..11: mod_base = OTHER; note = 2'-O-(2-methoxyethyl) ribonucleotide
  modified_base 12: mod_base = OTHER; note = locked nucleic acid
  modified_base 13..14: mod_base = OTHER; note = 2'-O-(2-methoxyethyl) ribonucleotide
  modified_base 15: mod_base = OTHER; note = locked nucleic acid
  modified_base 16..20: mod_base = OTHER; note = 2'-O-(2-methoxyethyl) ribonucleotide
  modified_base 2: mod_base = OTHER; note = 5-methyl cytidine
  modified_base 4..7: mod_base = OTHER; note = 5-methyl cytidine
  modified_base 20: mod_base = OTHER; note = 5-methyl cytidine
gctccccttttgggaatttc

SEQ ID NO: 4801 - RNA, 20 nt, synthetic construct
  source 1..20: mol_type = other RNA
  modified_base 1..20: mod_base = OTHER; note = Phosphorothioate linkage
  modified_base 1..5: mod_base = OTHER; note = 2'-O-(2-methoxyethyl) ribonucleotide
  modified_base 6: mod_base = OTHER; note = locked nucleic acid
  modified_base 7..8: mod_base = OTHER; note = 2'-O-(2-methoxyethyl) ribonucleotide
  modified_base 9: mod_base = OTHER; note = locked nucleic acid
  modified_base 10..11: mod_base = OTHER; note = 2'-O-(2-methoxyethyl) ribonucleotide
  modified_base 12: mod_base = OTHER; note = locked nucleic acid
  modified_base 13..14: mod_base = OTHER; note = 2'-O-(2-methoxyethyl) ribonucleotide
  modified_base 15: mod_base = OTHER; note = locked nucleic acid
  modified_base 16..20: mod_base = OTHER; note = 2'-O-(2-methoxyethyl) ribonucleotide
  modified_base 6..7: mod_base = OTHER; note = 5-methyl cytidine
  modified_base 12: mod_base = OTHER; note = 5-methyl cytidine
  modified_base 15: mod_base = OTHER; note = 5-methyl cytidine
  modified_base 17: mod_base = OTHER; note = 5-methyl cytidine
tgagaccttggcttctcgaa

SEQ ID NO: 4802 - RNA, 20 nt, synthetic construct
  source 1..20: mol_type = other RNA
  modified_base 1..20: mod_base = OTHER; note = Phosphorothioate linkage
  modified_base 1..5: mod_base = OTHER; note = 2'-O-(2-methoxyethyl) ribonucleotide
  modified_base 6: mod_base = OTHER; note = locked nucleic acid
  modified_base 7..8: mod_base = OTHER; note = 2'-O-(2-methoxyethyl) ribonucleotide
  modified_base 9: mod_base = OTHER; note = locked nucleic acid
  modified_base 10..11: mod_base = OTHER; note = 2'-O-(2-methoxyethyl) ribonucleotide
  modified_base 12: mod_base = OTHER; note = locked nucleic acid
  modified_base 13..14: mod_base = OTHER; note = 2'-O-(2-methoxyethyl) ribonucleotide
  modified_base 15: mod_base = OTHER; note = locked nucleic acid
  modified_base 16..20: mod_base = OTHER; note = 2'-O-(2-methoxyethyl) ribonucleotide
  modified_base 7: mod_base = OTHER; note = 5-methyl cytidine
  modified_base 12..13: mod_base = OTHER; note = 5-methyl cytidine
  modified_base 19..20: mod_base = OTHER; note = 5-methyl cytidine
tgggaacgagacctgagacc

SEQ ID NO: 4803 - RNA, 20 nt, synthetic construct
  source 1..20: mol_type = other RNA
  modified_base 1..20: mod_base = OTHER; note = Phosphorothioate linkage
  modified_base 1..5: mod_base = OTHER; note = 2'-O-(2-methoxyethyl) ribonucleotide
  modified_base 6: mod_base = OTHER; note = locked nucleic acid
  modified_base 7..8: mod_base = OTHER; note = 2'-O-(2-methoxyethyl) ribonucleotide
  modified_base 9: mod_base = OTHER; note = locked nucleic acid
  modified_base 10..11: mod_base = OTHER; note = 2'-O-(2-methoxyethyl) ribonucleotide
  modified_base 12: mod_base = OTHER; note = locked nucleic acid
  modified_base 13..14: mod_base = OTHER; note = 2'-O-(2-methoxyethyl) ribonucleotide
  modified_base 15: mod_base = OTHER; note = locked nucleic acid
  modified_base 16..20: mod_base = OTHER; note = 2'-O-(2-methoxyethyl) ribonucleotide
  modified_base 1: mod_base = OTHER; note = 5-methyl cytidine
  modified_base 7..8: mod_base = OTHER; note = 5-methyl cytidine
  modified_base 15: mod_base = OTHER; note = 5-methyl cytidine
  modified_base 20: mod_base = OTHER; note = 5-methyl cytidine
cgagggcctgggaacgagac

SEQ ID NO: 4804 - RNA, 20 nt, synthetic construct
  source 1..20: mol_type = other RNA
  modified_base 1..20: mod_base = OTHER; note = Phosphorothioate linkage
  modified_base 1..5: mod_base = OTHER; note = 2'-O-(2-methoxyethyl) ribonucleotide
  modified_base 6: mod_base = OTHER; note = locked nucleic acid
  modified_base 7..8: mod_base = OTHER; note = 2'-O-(2-methoxyethyl) ribonucleotide
  modified_base 9: mod_base = OTHER; note = locked nucleic acid
  modified_base 10..11: mod_base = OTHER; note = 2'-O-(2-methoxyethyl) ribonucleotide
  modified_base 12: mod_base = OTHER; note = locked nucleic acid
  modified_base 13..14: mod_base = OTHER; note = 2'-O-(2-methoxyethyl) ribonucleotide
  modified_base 15: mod_base = OTHER; note = locked nucleic acid
  modified_base 16..20: mod_base = OTHER; note = 2'-O-(2-methoxyethyl) ribonucleotide
  modified_base 1: mod_base = OTHER; note = 5-methyl cytidine
  modified_base 3: mod_base = OTHER; note = 5-methyl cytidine
  modified_base 5..6: mod_base = OTHER; note = 5-methyl cytidine
ctctcctggtggtggtgggt

SEQ ID NO: 4805 - RNA, 20 nt, synthetic construct
  source 1..20: mol_type = other RNA
  modified_base 1..20: mod_base = OTHER; note = Phosphorothioate linkage
  modified_base 1..5: mod_base = OTHER; note = 2'-O-(2-methoxyethyl) ribonucleotide
  modified_base 6: mod_base = OTHER; note = locked nucleic acid
  modified_base 7..8: mod_base = OTHER; note = 2'-O-(2-methoxyethyl) ribonucleotide
  modified_base 9: mod_base = OTHER; note = locked nucleic acid
  modified_base 10..11: mod_base = OTHER; note = 2'-O-(2-methoxyethyl) ribonucleotide
  modified_base 12: mod_base = OTHER; note = locked nucleic acid
  modified_base 13..14: mod_base = OTHER; note = 2'-O-(2-methoxyethyl) ribonucleotide
  modified_base 15: mod_base = OTHER; note = locked nucleic acid
  modified_base 16..20: mod_base = OTHER; note = 2'-O-(2-methoxyethyl) ribonucleotide
  modified_base 2..5: mod_base = OTHER; note = 5-methyl cytidine
  modified_base 7: mod_base = OTHER; note = 5-methyl cytidine
  modified_base 9..10: mod_base = OTHER; note = 5-methyl cytidine
tcccctctcctggtggtggt

SEQ ID NO: 4806 - RNA, 20 nt, synthetic construct
  source 1..20: mol_type = other RNA
  modified_base 1..20: mod_base = OTHER; note = Phosphorothioate linkage
  modified_base 1..5: mod_base = OTHER; note = 2'-O-(2-methoxyethyl) ribonucleotide
  modified_base 6: mod_base = OTHER; note = locked nucleic acid
  modified_base 7..8: mod_base = OTHER; note = 2'-O-(2-methoxyethyl) ribonucleotide
  modified_base 9: mod_base = OTHER; note = locked nucleic acid
  modified_base 10..11: mod_base = OTHER; note = 2'-O-(2-methoxyethyl) ribonucleotide
  modified_base 12: mod_base = OTHER; note = locked nucleic acid
  modified_base 13..14: mod_base = OTHER; note = 2'-O-(2-methoxyethyl) ribonucleotide
  modified_base 15: mod_base = OTHER; note = locked nucleic acid
  modified_base 16..20: mod_base = OTHER; note = 2'-O-(2-methoxyethyl) ribonucleotide
  modified_base 3: mod_base = OTHER; note = 5-methyl cytidine
  modified_base 6..9: mod_base = OTHER; note = 5-methyl cytidine
  modified_base 11: mod_base = OTHER; note = 5-methyl cytidine
  modified_base 13..14: mod_base = OTHER; note = 5-methyl cytidine
ttcttcccctctcctggtgg

SEQ ID NO: 4807 - RNA, 20 nt, synthetic construct
  source 1..20: mol_type = other RNA
  modified_base 1..20: mod_base = OTHER; note = Phosphorothioate linkage
  modified_base 1..5: mod_base = OTHER; note = 2'-O-(2-methoxyethyl) ribonucleotide
  modified_base 6: mod_base = OTHER; note = locked nucleic acid
  modified_base 7..8: mod_base = OTHER; note = 2'-O-(2-methoxyethyl) ribonucleotide
  modified_base 9: mod_base = OTHER; note = locked nucleic acid
  modified_base 10..11: mod_base = OTHER; note = 2'-O-(2-methoxyethyl) ribonucleotide
  modified_base 12: mod_base = OTHER; note = locked nucleic acid
  modified_base 13..14: mod_base = OTHER; note = 2'-O-(2-methoxyethyl) ribonucleotide
  modified_base 15: mod_base = OTHER; note = locked nucleic acid
  modified_base 16..20: mod_base = OTHER; note = 2'-O-(2-methoxyethyl) ribonucleotide
  modified_base 2: mod_base = OTHER; note = 5-methyl cytidine
  modified_base 6: mod_base = OTHER; note = 5-methyl cytidine
  modified_base 9: mod_base = OTHER; note = 5-methyl cytidine
  modified_base 12..15: mod_base = OTHER; note = 5-methyl cytidine
  modified_base 17: mod_base = OTHER; note = 5-methyl cytidine
  modified_base 19..20: mod_base = OTHER; note = 5-methyl cytidine
gctggcttcttcccctctcc

SEQ ID NO: 4808 - RNA, 20 nt, synthetic construct
  source 1..20: mol_type = other RNA
  modified_base 1..20: mod_base = OTHER; note = Phosphorothioate linkage
  modified_base 1..5: mod_base = OTHER; note = 2'-O-(2-methoxyethyl) ribonucleotide
  modified_base 6: mod_base = OTHER; note = locked nucleic acid
  modified_base 7..8: mod_base = OTHER; note = 2'-O-(2-methoxyethyl) ribonucleotide
  modified_base 9: mod_base = OTHER; note = locked nucleic acid
  modified_base 10..11: mod_base = OTHER; note = 2'-O-(2-methoxyethyl) ribonucleotide
  modified_base 12: mod_base = OTHER; note = locked nucleic acid
  modified_base 13..14: mod_base = OTHER; note = 2'-O-(2-methoxyethyl) ribonucleotide
  modified_base 15: mod_base = OTHER; note = locked nucleic acid
  modified_base 16..20: mod_base = OTHER; note = 2'-O-(2-methoxyethyl) ribonucleotide
  modified_base 1: mod_base = OTHER; note = 5-methyl cytidine
  modified_base 5: mod_base = OTHER; note = 5-methyl cytidine
  modified_base 14: mod_base = OTHER; note = 5-methyl cytidine
  modified_base 18: mod_base = OTHER; note = 5-methyl cytidine
ctgtcggtaggtgctggctt

SEQ ID NO: 4809 - RNA, 20 nt, synthetic construct
  source 1..20: mol_type = other RNA
  modified_base 1..20: mod_base = OTHER; note = Phosphorothioate linkage
  modified_base 1..5: mod_base = OTHER; note = 2'-O-(2-methoxyethyl) ribonucleotide
  modified_base 6: mod_base = OTHER; note = locked nucleic acid
  modified_base 7..8: mod_base = OTHER; note = 2'-O-(2-methoxyethyl) ribonucleotide
  modified_base 9: mod_base = OTHER; note = locked nucleic acid
  modified_base 10..11: mod_base = OTHER; note = 2'-O-(2-methoxyethyl) ribonucleotide
  modified_base 12: mod_base = OTHER; note = locked nucleic acid
  modified_base 13..14: mod_base = OTHER; note = 2'-O-(2-methoxyethyl) ribonucleotide
  modified_base 15: mod_base = OTHER; note = locked nucleic acid
  modified_base 16..20: mod_base = OTHER; note = 2'-O-(2-methoxyethyl) ribonucleotide
  modified_base 3: mod_base = OTHER; note = 5-methyl cytidine
  modified_base 5..6: mod_base = OTHER; note = 5-methyl cytidine
  modified_base 8..11: mod_base = OTHER; note = 5-methyl cytidine
  modified_base 15: mod_base = OTHER; note = 5-methyl cytidine
agctccacccctgtcggtag

SEQ ID NO: 4810 - RNA, 20 nt, synthetic construct
  source 1..20: mol_type = other RNA
  modified_base 1..20: mod_base = OTHER; note = Phosphorothioate linkage
  modified_base 1..5: mod_base = OTHER; note = 2'-O-(2-methoxyethyl) ribonucleotide
  modified_base 6: mod_base = OTHER; note = locked nucleic acid
  modified_base 7..8: mod_base = OTHER; note = 2'-O-(2-methoxyethyl) ribonucleotide
  modified_base 9: mod_base = OTHER; note = locked nucleic acid
  modified_base 10..11: mod_base = OTHER; note = 2'-O-(2-methoxyethyl) ribonucleotide
  modified_base 12: mod_base = OTHER; note = locked nucleic acid
  modified_base 13..14: mod_base = OTHER; note = 2'-O-(2-methoxyethyl) ribonucleotide
  modified_base 15: mod_base = OTHER; note = locked nucleic acid
  modified_base 16..20: mod_base = OTHER; note = 2'-O-(2-methoxyethyl) ribonucleotide
  modified_base 2..3: mod_base = OTHER; note = 5-methyl cytidine
  modified_base 6: mod_base = OTHER; note = 5-methyl cytidine
  modified_base 8..9: mod_base = OTHER; note = 5-methyl cytidine
  modified_base 11..14: mod_base = OTHER; note = 5-methyl cytidine
  modified_base 18: mod_base = OTHER; note = 5-methyl cytidine
acccagctccacccctgtcg

SEQ ID NO: 4811 - RNA, 20 nt, synthetic construct
  source 1..20: mol_type = other RNA
  modified_base 1..20: mod_base = OTHER; note = Phosphorothioate linkage
  modified_base 1..5: mod_base = OTHER; note = 2'-O-(2-methoxyethyl) ribonucleotide
  modified_base 6: mod_base = OTHER; note = locked nucleic acid
  modified_base 7..8: mod_base = OTHER; note = 2'-O-(2-methoxyethyl) ribonucleotide
  modified_base 9: mod_base = OTHER; note = locked nucleic acid
  modified_base 10..11: mod_base = OTHER; note = 2'-O-(2-methoxyethyl) ribonucleotide
  modified_base 12: mod_base = OTHER; note = locked nucleic acid
  modified_base 13..14: mod_base = OTHER; note = 2'-O-(2-methoxyethyl) ribonucleotide
  modified_base 15: mod_base = OTHER; note = locked nucleic acid
  modified_base 16..20: mod_base = OTHER; note = 2'-O-(2-methoxyethyl) ribonucleotide
  modified_base 1: mod_base = OTHER; note = 5-methyl cytidine
  modified_base 6..8: mod_base = OTHER; note = 5-methyl cytidine
  modified_base 11: mod_base = OTHER; note = 5-methyl cytidine
  modified_base 13..14: mod_base = OTHER; note = 5-methyl cytidine
  modified_base 16..19: mod_base = OTHER; note = 5-methyl cytidine
  modified_base 19..20: mod_base = OTHER; note = 5-methyl cytidine
cttgacccagctccacccct

SEQ ID NO: 4812 - RNA, 20 nt, synthetic construct
  source 1..20: mol_type = other RNA
  modified_base 1..20: mod_base = OTHER; note = Phosphorothioate linkage
  modified_base 1..5: mod_base = OTHER; note = 2'-O-(2-methoxyethyl) ribonucleotide
  modified_base 6: mod_base = OTHER; note = locked nucleic acid
  modified_base 7..8: mod_base = OTHER; note = 2'-O-(2-methoxyethyl) ribonucleotide
  modified_base 9: mod_base = OTHER; note = locked nucleic acid
  modified_base 10..11: mod_base = OTHER; note = 2'-O-(2-methoxyethyl) ribonucleotide
  modified_base 12: mod_base = OTHER; note = locked nucleic acid
  modified_base 13..14: mod_base = OTHER; note = 2'-O-(2-methoxyethyl) ribonucleotide
  modified_base 15: mod_base = OTHER; note = locked nucleic acid
  modified_base 16..20: mod_base = OTHER; note = 2'-O-(2-methoxyethyl) ribonucleotide
  modified_base 6: mod_base = OTHER; note = 5-methyl cytidine
  modified_base 8: mod_base = OTHER; note = 5-methyl cytidine
  modified_base 11..12: mod_base = OTHER; note = 5-methyl cytidine
  modified_base 18: mod_base = OTHER; note = 5-methyl cytidine
ggagtctcagccggagacaa

SEQ ID NO: 4813 - RNA, 20 nt, synthetic construct
  source 1..20: mol_type = other RNA
  modified_base 1..20: mod_base = OTHER; note = Phosphorothioate linkage
  modified_base 1..5: mod_base = OTHER; note = 2'-O-(2-methoxyethyl) ribonucleotide
  modified_base 6: mod_base = OTHER; note = locked nucleic acid
  modified_base 7..8: mod_base = OTHER; note = 2'-O-(2-methoxyethyl) ribonucleotide
  modified_base 9: mod_base = OTHER; note = locked nucleic acid
  modified_base 10..11: mod_base = OTHER; note = 2'-O-(2-methoxyethyl) ribonucleotide
  modified_base 12: mod_base = OTHER; note = locked nucleic acid
  modified_base 13..14: mod_base = OTHER; note = 2'-O-(2-methoxyethyl) ribonucleotide
  modified_base 15: mod_base = OTHER; note = locked nucleic acid
  modified_base 16..20: mod_base = OTHER; note = 2'-O-(2-methoxyethyl) ribonucleotide
  modified_base 7..10: mod_base = OTHER; note = 5-methyl cytidine
  modified_base 17: mod_base = OTHER; note = 5-methyl cytidine
  modified_base 19: mod_base = OTHER; note = 5-methyl cytidine
gaggttcccctggagtctca

SEQ ID NO: 4814 - RNA, 20 nt, synthetic construct
  source 1..20: mol_type = other RNA
  modified_base 1..20: mod_base = OTHER; note = Phosphorothioate linkage
  modified_base 1..5: mod_base = OTHER; note = 2'-O-(2-methoxyethyl) ribonucleotide
  modified_base 6: mod_base = OTHER; note = locked nucleic acid
  modified_base 7..8: mod_base = OTHER; note = 2'-O-(2-methoxyethyl) ribonucleotide
  modified_base 9: mod_base = OTHER; note = locked nucleic acid
  modified_base 10..11: mod_base = OTHER; note = 2'-O-(2-methoxyethyl) ribonucleotide
  modified_base 12: mod_base = OTHER; note = locked nucleic acid
  modified_base 13..14: mod_base = OTHER; note = 2'-O-(2-methoxyethyl) ribonucleotide
  modified_base 15: mod_base = OTHER; note = locked nucleic acid
  modified_base 16..20: mod_base = OTHER; note = 2'-O-(2-methoxyethyl) ribonucleotide
  modified_base 2: mod_base = OTHER; note = 5-methyl cytidine
  modified_base 11..14: mod_base = OTHER; note = 5-methyl cytidine
gcttgaggttcccctggagt

SEQ ID NO: 4815 - RNA, 20 nt, synthetic construct
  source 1..20: mol_type = other RNA
  modified_base 1..20: mod_base = OTHER; note = Phosphorothioate linkage
  modified_base 1..5: mod_base = OTHER; note = 2'-O-(2-methoxyethyl) ribonucleotide
  modified_base 6: mod_base = OTHER; note = locked nucleic acid
  modified_base 15..18: mod_base = OTHER; note = 2'-O-(2-methoxyethyl) ribonucleotide
  modified_base 6: mod_base = OTHER; note = 5-methyl cytidine
  modified_base 15..18: mod_base = OTHER; note = 5-methyl cytidine
gtgagcttgaggttcccctg

SEQ ID NO: 4816 - RNA, 20 nt, synthetic construct
  source 1..20: mol_type = other RNA
  modified_base 1..20: mod_base = OTHER; note = Phosphorothioate linkage
  modified_base 1..5: mod_base = OTHER; note = 2'-O-(2-methoxyethyl) ribonucleotide
  modified_base 6: mod_base = OTHER; note = locked nucleic acid
  modified_base 7..8: mod_base = OTHER; note = 2'-O-(2-methoxyethyl) ribonucleotide
  modified_base 9: mod_base = OTHER; note = locked nucleic acid
  modified_base 10..11: mod_base = OTHER; note = 2'-O-(2-methoxyethyl) ribonucleotide
  modified_base 12: mod_base = OTHER; note = locked nucleic acid
  modified_base 13..14: mod_base = OTHER; note = 2'-O-(2-methoxyethyl) ribonucleotide
  modified_base 15: mod_base = OTHER; note = locked nucleic acid
  modified_base 16..20: mod_base = OTHER; note = 2'-O-(2-methoxyethyl) ribonucleotide
  modified_base 1: mod_base = OTHER; note = 5-methyl cytidine
  modified_base 3..4: mod_base = OTHER; note = 5-methyl cytidine
  modified_base 9..10: mod_base = OTHER; note = 5-methyl cytidine
  modified_base 18: mod_base = OTHER; note = 5-methyl cytidine
cgccagggccatgtgagctt

SEQ ID NO: 4817 - RNA, 20 nt, synthetic construct
  source 1..20: mol_type = other RNA
  modified_base 1..20: mod_base = OTHER; note = Phosphorothioate linkage
  modified_base 1..5: mod_base = OTHER; note = 2'-O-(2-methoxyethyl) ribonucleotide
  modified_base 6: mod_base = OTHER; note = locked nucleic acid
  modified_base 7..8: mod_base = OTHER; note = 2'-O-(2-methoxyethyl) ribonucleotide
  modified_base 9: mod_base = OTHER; note = locked nucleic acid
  modified_base 10..11: mod_base = OTHER; note = 2'-O-(2-methoxyethyl) ribonucleotide
  modified_base 12: mod_base = OTHER; note = locked nucleic acid
  modified_base 13..14: mod_base = OTHER; note = 2'-O-(2-methoxyethyl) ribonucleotide
  modified_base 15: mod_base = OTHER; note = locked nucleic acid
  modified_base 16..20: mod_base = OTHER; note = 2'-O-(2-methoxyethyl) ribonucleotide
  modified_base 3..5: mod_base = OTHER; note = 5-methyl cytidine
  modified_base 6: mod_base = OTHER; note = 5-methyl cytidine
  modified_base 7..8: mod_base = OTHER; note = 5-methyl cytidine
  modified_base 13..14: mod_base = OTHER; note = 5-methyl cytidine
ggcccgccagggccatgtga

SEQ ID NO: 4818 - RNA, 20 nt, synthetic construct
  source 1..20: mol_type = other RNA
  modified_base 1..20: mod_base = OTHER; note = Phosphorothioate linkage
  modified_base 1..5: mod_base = OTHER; note = 2'-O-(2-methoxyethyl) ribonucleotide
  modified_base 6: mod_base = OTHER; note = locked nucleic acid
  modified_base 7..8: mod_base = OTHER; note = 2'-O-(2-methoxyethyl) ribonucleotide
  modified_base 9: mod_base = OTHER; note = locked nucleic acid
  modified_base 10..11: mod_base = OTHER; note = 2'-O-(2-methoxyethyl) ribonucleotide
  modified_base 12: mod_base = OTHER; note = locked nucleic acid
  modified_base 13..14: mod_base = OTHER; note = 2'-O-(2-methoxyethyl) ribonucleotide
  modified_base 15: mod_base = OTHER; note = locked nucleic acid
  modified_base 16..20: mod_base = OTHER; note = 2'-O-(2-methoxyethyl) ribonucleotide
  modified_base 1: mod_base = OTHER; note = 5-methyl cytidine
  modified_base 7..9: mod_base = OTHER; note = 5-methyl cytidine
  modified_base 11..12: mod_base = OTHER; note = 5-methyl cytidine
  modified_base 17..18: mod_base = OTHER; note = 5-methyl cytidine
caggggcccgccagggccat

SEQ ID NO: 4819 - RNA, 20 nt, synthetic construct
  source 1..20: mol_type = other RNA
  modified_base 1..20: mod_base = OTHER; note = Phosphorothioate linkage
  modified_base 1..5: mod_base = OTHER; note = 2'-O-(2-methoxyethyl) ribonucleotide
  modified_base 6: mod_base = OTHER; note = locked nucleic acid
  modified_base 7..8: mod_base = OTHER; note = 2'-O-(2-methoxyethyl) ribonucleotide
  modified_base 9: mod_base = OTHER; note = locked nucleic acid
  modified_base 10..11: mod_base = OTHER; note = 2'-O-(2-methoxyethyl) ribonucleotide
  modified_base 12: mod_base = OTHER; note = locked nucleic acid
  modified_base 13..14: mod_base = OTHER; note = 2'-O-(2-methoxyethyl) ribonucleotide
  modified_base 15: mod_base = OTHER; note = locked nucleic acid
  modified_base 16..20: mod_base = OTHER; note = 2'-O-(2-methoxyethyl) ribonucleotide
  modified_base 3..5: mod_base = OTHER; note = 5-methyl cytidine
  modified_base 11..13: mod_base = OTHER; note = 5-methyl cytidine
  modified_base 15..16: mod_base = OTHER; note = 5-methyl cytidine
tgcccaggggcccgccaggg

SEQ ID NO: 4820 - RNA, 20 nt, synthetic construct
  source 1..20: mol_type = other RNA
  modified_base 1..20: mod_base = OTHER; note = Phosphorothioate linkage
  modified_base 1..5: mod_base = OTHER; note = 2'-O-(2-methoxyethyl) ribonucleotide
  modified_base 6: mod_base = OTHER; note = locked nucleic acid
  modified_base 7..8: mod_base = OTHER; note = 2'-O-(2-methoxyethyl) ribonucleotide
  modified_base 9: mod_base = OTHER; note = locked nucleic acid
  modified_base 10..11: mod_base = OTHER; note = 2'-O-(2-methoxyethyl) ribonucleotide
  modified_base 12: mod_base = OTHER; note = locked nucleic acid
  modified_base 13..14: mod_base = OTHER; note = 2'-O-(2-methoxyethyl) ribonucleotide
  modified_base 15: mod_base = OTHER; note = locked nucleic acid
  modified_base 16..20: mod_base = OTHER; note = 2'-O-(2-methoxyethyl) ribonucleotide
  modified_base 3: mod_base = OTHER; note = 5-methyl cytidine
  modified_base 5..6: mod_base = OTHER; note = 5-methyl cytidine
  modified_base 9..11: mod_base = OTHER; note = 5-methyl cytidine
  modified_base 17..19: mod_base = OTHER; note = 5-methyl cytidine
tgctcctgcccaggggcccg

SEQ ID NO: 4821 - RNA, 20 nt, synthetic construct
  source 1..20: mol_type = other RNA
  modified_base 1..20: mod_base = OTHER; note = Phosphorothioate linkage
  modified_base 1..5: mod_base = OTHER; note = 2'-O-(2-methoxyethyl) ribonucleotide
  modified_base 6: mod_base = OTHER; note = locked nucleic acid
  modified_base 7..8: mod_base = OTHER; note = 2'-O-(2-methoxyethyl) ribonucleotide
  modified_base 9: mod_base = OTHER; note = locked nucleic acid
  modified_base 10..11: mod_base = OTHER; note = 2'-O-(2-methoxyethyl) ribonucleotide
  modified_base 12: mod_base = OTHER; note = locked nucleic acid
  modified_base 13..14: mod_base = OTHER; note = 2'-O-(2-methoxyethyl) ribonucleotide
  modified_base 15: mod_base = OTHER; note = locked nucleic acid
  modified_base 16..20: mod_base = OTHER; note = 2'-O-(2-methoxyethyl) ribonucleotide
  modified_base 18: mod_base = OTHER; note = 5-methyl cytidine
ggatgggttaaggaaggcga

SEQ ID NO: 4822 - RNA, 20 nt, synthetic construct
  source 1..20: mol_type = other RNA
  modified_base 1..20: mod_base = OTHER; note = Phosphorothioate linkage
  modified_base 1..5: mod_base = OTHER; note = 2'-O-(2-methoxyethyl) ribonucleotide
  modified_base 6: mod_base = OTHER; note = locked nucleic acid
  modified_base 7..8: mod_base = OTHER; note = 2'-O-(2-methoxyethyl) ribonucleotide
  modified_base 9: mod_base = OTHER; note = locked nucleic acid
  modified_base 10..11: mod_base = OTHER; note = 2'-O-(2-methoxyethyl) ribonucleotide
  modified_base 12: mod_base = OTHER; note = locked nucleic acid
  modified_base 13..14: mod_base = OTHER; note = 2'-O-(2-methoxyethyl) ribonucleotide
  modified_base 15: mod_base = OTHER; note = locked nucleic acid
  modified_base 16..20: mod_base = OTHER; note = 2'-O-(2-methoxyethyl) ribonucleotide
  modified_base 4: mod_base = OTHER; note = 5-methyl cytidine
  modified_base 6..7: mod_base = OTHER; note = 5-methyl cytidine
  modified_base 10: mod_base = OTHER; note = 5-methyl cytidine
aggcgcctgcaggatgggtt

SEQ ID NO: 4823 - RNA, 20 nt, synthetic construct
  source 1..20: mol_type = other RNA
  modified_base 1..20: mod_base = OTHER; note = Phosphorothioate linkage
  modified_base 1..4: mod_base = OTHER; note = 2'-O-(2-methoxyethyl) ribonucleotide
  modified_base 8: mod_base = OTHER; note = locked nucleic acid
  modified_base 10..11: mod_base = OTHER; note = 2'-O-(2-methoxyethyl) ribonucleotide
  modified_base 14: mod_base = OTHER; note = locked nucleic acid
  modified_base 2..4: mod_base = OTHER; note = 5-methyl cytidine
  modified_base 8: mod_base = OTHER; note = 5-methyl cytidine
  modified_base 10..11: mod_base = OTHER; note = 5-methyl cytidine
  modified_base 14: mod_base = OTHER; note = 5-methyl cytidine
ccccaggcgcctgcaggatg

SEQ ID NO: 4824 - RNA, 20 nt, synthetic construct
  source 1..20: mol_type = other RNA
  modified_base 1..20: mod_base = OTHER; note = Phosphorothioate linkage
  modified_base 1..5: mod_base = OTHER; note = 2'-O-(2-methoxyethyl) ribonucleotide
  modified_base 6: mod_base = OTHER; note = locked nucleic acid
  modified_base 7..8: mod_base = OTHER; note = 2'-O-(2-methoxyethyl) ribonucleotide
  modified_base 9: mod_base = OTHER; note = locked nucleic acid
  modified_base 10..11: mod_base = OTHER; note = 2'-O-(2-methoxyethyl) ribonucleotide
  modified_base 12: mod_base = OTHER; note = locked nucleic acid
  modified_base 13..14: mod_base = OTHER; note = 2'-O-(2-methoxyethyl) ribonucleotide
  modified_base 15: mod_base = OTHER; note = locked nucleic acid
  modified_base 16..20: mod_base = OTHER; note = 2'-O-(2-methoxyethyl) ribonucleotide
  modified_base 3: mod_base = OTHER; note = 5-methyl cytidine
  modified_base 5..9: mod_base = OTHER; note = 5-methyl cytidine
  modified_base 13: mod_base = OTHER; note = 5-methyl cytidine
  modified_base 15..16: mod_base = OTHER; note = 5-methyl cytidine
  modified_base 19: mod_base = OTHER; note = 5-methyl cytidine
aactcccccaggcgcctgca

SEQ ID NO: 4825 - RNA, 20 nt, synthetic construct
  source 1..20: mol_type = other RNA
  modified_base 1..20: mod_base = OTHER; note = Phosphorothioate linkage
  modified_base 1..5: mod_base = OTHER; note = 2'-O-(2-methoxyethyl) ribonucleotide
  modified_base 6: mod_base = OTHER; note = locked nucleic acid
  modified_base 7..8: mod_base = OTHER; note = 2'-O-(2-methoxyethyl) ribonucleotide
  modified_base 9: mod_base = OTHER; note = locked nucleic acid
  modified_base 10..11: mod_base = OTHER; note = 2'-O-(2-methoxyethyl) ribonucleotide
  modified_base 12: mod_base = OTHER; note = locked nucleic acid
  modified_base 13..14: mod_base = OTHER; note = 2'-O-(2-methoxyethyl) ribonucleotide
  modified_base 15: mod_base = OTHER; note = locked nucleic acid
  modified_base 16..20: mod_base = OTHER; note = 2'-O-(2-methoxyethyl) ribonucleotide
  modified_base 2: mod_base = OTHER; note = 5-methyl cytidine
  modified_base 4: mod_base = OTHER; note = 5-methyl cytidine
  modified_base 8: mod_base = OTHER; note = 5-methyl cytidine
  modified_base 11: mod_base = OTHER; note = 5-methyl cytidine
  modified_base 13: mod_base = OTHER; note = 5-methyl cytidine
  modified_base 17: mod_base = OTHER; note = 5-methyl cytidine
gcgctatcatctctagcaaa

SEQ ID NO: 4826 - RNA, 20 nt, synthetic construct
  source 1..20: mol_type = other RNA
  modified_base 1..20: mod_base = OTHER; note = Phosphorothioate linkage
  modified_base 1..5: mod_base = OTHER; note = 2'-O-(2-methoxyethyl) ribonucleotide
  modified_base 6: mod_base = OTHER; note = locked nucleic acid
  modified_base 7..8: mod_base = OTHER; note = 2'-O-(2-methoxyethyl) ribonucleotide
  modified_base 9: mod_base = OTHER; note = locked nucleic acid
  modified_base 10..11: mod_base = OTHER; note = 2'-O-(2-methoxyethyl) ribonucleotide
  modified_base 12: mod_base = OTHER; note = locked nucleic acid
  modified_base 13..14: mod_base = OTHER; note = 2'-O-(2-methoxyethyl) ribonucleotide
  modified_base 15: mod_base = OTHER; note = locked nucleic acid
  modified_base 16..20: mod_base = OTHER; note = 2'-O-(2-methoxyethyl) ribonucleotide
  modified_base 2: mod_base = OTHER; note = 5-methyl cytidine
  modified_base 5..6: mod_base = OTHER; note = 5-methyl cytidine
  modified_base 10..12: mod_base = OTHER; note = 5-methyl cytidine
  modified_base 16..18: mod_base = OTHER; note = 5-methyl cytidine
tctgcctggcccaggccctt

SEQ ID NO: 4827 - RNA, 20 nt, synthetic construct
  source 1..20: mol_type = other RNA
  modified_base 1..20: mod_base = OTHER; note = Phosphorothioate linkage
  modified_base 1..5: mod_base = OTHER; note = 2'-O-(2-methoxyethyl) ribonucleotide
  modified_base 6: mod_base = OTHER; note = locked nucleic acid
  modified_base 7..8: mod_base = OTHER; note = 2'-O-(2-methoxyethyl) ribonucleotide
  modified_base 9: mod_base = OTHER; note = locked nucleic acid
  modified_base 10..11: mod_base = OTHER; note = 2'-O-(2-methoxyethyl) ribonucleotide
  modified_base 12: mod_base = OTHER; note = locked nucleic acid
  modified_base 13..14: mod_base = OTHER; note = 2'-O-(2-methoxyethyl) ribonucleotide
  modified_base 15: mod_base = OTHER; note = locked nucleic acid
  modified_base 16..20: mod_base = OTHER; note = 2'-O-(2-methoxyethyl) ribonucleotide
  modified_base 3..4: mod_base = OTHER; note = 5-methyl cytidine
  modified_base 7: mod_base = OTHER; note = 5-methyl cytidine
  modified_base 9: mod_base = OTHER; note = 5-methyl cytidine
  modified_base 12..13: mod_base = OTHER; note = 5-methyl cytidine
  modified_base 17..19: mod_base = OTHER; note = 5-methyl cytidine
atccatctctgcctggccca

SEQ ID NO: 4828 - RNA, 20 nt, synthetic construct
  source 1..20: mol_type = other RNA
  modified_base 1..20: mod_base = OTHER; note = Phosphorothioate linkage
  modified_base 1..5: mod_base = OTHER; note = 2'-O-(2-methoxyethyl) ribonucleotide
  modified_base 6: mod_base = OTHER; note = locked nucleic acid
  modified_base 7..8: mod_base = OTHER; note = 2'-O-(2-methoxyethyl) ribonucleotide
  modified_base 9: mod_base = OTHER; note = locked nucleic acid
  modified_base 10..11: mod_base = OTHER; note = 2'-O-(2-methoxyethyl) ribonucleotide
  modified_base 12: mod_base = OTHER; note = locked nucleic acid
  modified_base 13..14: mod_base = OTHER; note = 2'-O-(2-methoxyethyl) ribonucleotide
  modified_base 15: mod_base = OTHER; note = locked nucleic acid
  modified_base 16..20: mod_base = OTHER; note = 2'-O-(2-methoxyethyl) ribonucleotide
  modified_base 2: mod_base = OTHER; note = 5-methyl cytidine
  modified_base 4..6: mod_base = OTHER; note = 5-methyl cytidine
  modified_base 9: mod_base = OTHER; note = 5-methyl cytidine
  modified_base 12..13: mod_base = OTHER; note = 5-methyl cytidine
  modified_base 16: mod_base = OTHER; note = 5-methyl cytidine
  modified_base 18: mod_base = OTHER; note = 5-methyl cytidine
tctcccatcatccatctctg

SEQ ID NO: 4829 - RNA, 20 nt, synthetic construct
  source 1..20: mol_type = other RNA
  modified_base 1..20: mod_base = OTHER; note = Phosphorothioate linkage
  modified_base 1..5: mod_base = OTHER; note = 2'-O-(2-methoxyethyl) ribonucleotide
  modified_base 6: mod_base = OTHER; note = locked nucleic acid
  modified_base 7..8: mod_base = OTHER; note = 2'-O-(2-methoxyethyl) ribonucleotide
  modified_base 9: mod_base = OTHER; note = locked nucleic acid
  modified_base 10..11: mod_base = OTHER; note = 2'-O-(2-methoxyethyl) ribonucleotide
  modified_base 12: mod_base = OTHER; note = locked nucleic acid
  modified_base 13..14: mod_base = OTHER; note = 2'-O-(2-methoxyethyl) ribonucleotide
  modified_base 15: mod_base = OTHER; note = locked nucleic acid
  modified_base 16..20: mod_base = OTHER; note = 2'-O-(2-methoxyethyl) ribonucleotide
  modified_base 1..3: mod_base = OTHER; note = 5-methyl cytidine
  modified_base 6: mod_base = OTHER; note = 5-methyl cytidine
  modified_base 8..10: mod_base = OTHER; note = 5-methyl cytidine
  modified_base 13: mod_base = OTHER; note = 5-methyl cytidine
  modified_base 16..17: mod_base = OTHER; note = 5-methyl cytidine
  modified_base 20: mod_base = OTHER; note = 5-methyl cytidine
cccatctcccatcatccatc

SEQ ID NO: 4830 - RNA, 20 nt, synthetic construct
  source 1..20: mol_type = other RNA
  modified_base 1..20: mod_base = OTHER; note = Phosphorothioate linkage
  modified_base 1..5: mod_base = OTHER; note = 2'-O-(2-methoxyethyl) ribonucleotide
  modified_base 6: mod_base = OTHER; note = locked nucleic acid
  modified_base 7..8: mod_base = OTHER; note = 2'-O-(2-methoxyethyl) ribonucleotide
  modified_base 9: mod_base = OTHER; note = locked nucleic acid
  modified_base 10..11: mod_base = OTHER; note = 2'-O-(2-methoxyethyl) ribonucleotide
  modified_base 12: mod_base = OTHER; note = locked nucleic acid
  modified_base 13..14: mod_base = OTHER; note = 2'-O-(2-methoxyethyl) ribonucleotide
  modified_base 15: mod_base = OTHER; note = locked nucleic acid
  modified_base 16..20: mod_base = OTHER; note = 2'-O-(2-methoxyethyl) ribonucleotide
  modified_base 2: mod_base = OTHER; note = 5-methyl cytidine
  modified_base 4: mod_base = OTHER; note = 5-methyl cytidine
  modified_base 6..7: mod_base = OTHER; note = 5-methyl cytidine
  modified_base 11..13: mod_base = OTHER; note = 5-methyl cytidine
  modified_base 16: mod_base = OTHER; note = 5-methyl cytidine
  modified_base 18..20: mod_base = OTHER; note = 5-methyl cytidine
tctctcctggcccatctccc

SEQ ID NO: 4831 - RNA, 20 nt, synthetic construct
  source 1..20: mol_type = other RNA
  modified_base 1..20: mod_base = OTHER; note = Phosphorothioate linkage
  modified_base 1..5: mod_base = OTHER; note = 2'-O-(2-methoxyethyl) ribonucleotide
  modified_base 6: mod_base = OTHER; note = locked nucleic acid
  modified_base 7..8: mod_base = OTHER; note = 2'-O-(2-methoxyethyl) ribonucleotide
  modified_base 9: mod_base = OTHER; note = locked nucleic acid
  modified_base 10..11: mod_base = OTHER; note = 2'-O-(2-methoxyethyl) ribonucleotide
  modified_base 12: mod_base = OTHER; note = locked nucleic acid
  modified_base 13..14: mod_base = OTHER; note = 2'-O-(2-methoxyethyl) ribonucleotide
  modified_base 15: mod_base = OTHER; note = locked nucleic acid
  modified_base 16..20: mod_base = OTHER; note = 2'-O-(2-methoxyethyl) ribonucleotide
  modified_base 4..5: mod_base = OTHER; note = 5-methyl cytidine
  modified_base 7: mod_base = OTHER; note = 5-methyl cytidine
  modified_base 9..10: mod_base = OTHER; note = 5-methyl cytidine
  modified_base 12: mod_base = OTHER; note = 5-methyl cytidine
  modified_base 14: mod_base = OTHER; note = 5-methyl cytidine
  modified_base 16..17: mod_base = OTHER; note = 5-methyl cytidine
gggcctctcctctctcctgg

SEQ ID NO: 4832 - RNA, 20 nt, synthetic construct
  source 1..20: mol_type = other RNA
  modified_base 1..20: mod_base = OTHER; note = Phosphorothioate linkage
  modified_base 1..5: mod_base = OTHER; note = 2'-O-(2-methoxyethyl) ribonucleotide
  modified_base 6: mod_base = OTHER; note = locked nucleic acid
  modified_base 7..8: mod_base = OTHER; note = 2'-O-(2-methoxyethyl) ribonucleotide
  modified_base 9: mod_base = OTHER; note = locked nucleic acid
  modified_base 10..11: mod_base = OTHER; note = 2'-O-(2-methoxyethyl) ribonucleotide
  modified_base 12: mod_base = OTHER; note = locked nucleic acid
  modified_base 13..14: mod_base = OTHER; note = 2'-O-(2-methoxyethyl) ribonucleotide
  modified_base 15: mod_base = OTHER; note = locked nucleic acid
  modified_base 16..20: mod_base = OTHER; note = 2'-O-(2-methoxyethyl) ribonucleotide
  modified_base 2..4: mod_base = OTHER; note = 5-methyl cytidine
  modified_base 9..10: mod_base = OTHER; note = 5-methyl cytidine
  modified_base 12: mod_base = OTHER; note = 5-methyl cytidine
  modified_base 14..15: mod_base = OTHER; note = 5-methyl cytidine
  modified_base 17: mod_base = OTHER; note = 5-methyl cytidine
  modified_base 19: mod_base = OTHER; note = 5-methyl cytidine
tccctgggcctctcctctct

SEQ ID NO: 4833 - RNA, 20 nt, synthetic construct
  source 1..20: mol_type = other RNA
  modified_base 1..20: mod_base = OTHER; note = Phosphorothioate linkage
  modified_base 1..5: mod_base = OTHER; note = 2'-O-(2-methoxyethyl) ribonucleotide
  modified_base 6: mod_base = OTHER; note = locked nucleic acid
  modified_base 7..8: mod_base = OTHER; note = 2'-O-(2-methoxyethyl) ribonucleotide
  modified_base 9: mod_base = OTHER; note = locked nucleic acid
  modified_base 10..11: mod_base = OTHER; note = 2'-O-(2-methoxyethyl) ribonucleotide
  modified_base 12: mod_base = OTHER; note = locked nucleic acid
  modified_base 13..14: mod_base = OTHER; note = 2'-O-(2-methoxyethyl) ribonucleotide
  modified_base 15: mod_base = OTHER; note = locked nucleic acid
  modified_base 16..20: mod_base = OTHER; note = 2'-O-(2-methoxyethyl) ribonucleotide
  modified_base 2: mod_base = OTHER; note = 5-methyl cytidine
  modified_base 6..8: mod_base = OTHER; note = 5-methyl cytidine
  modified_base 13..14: mod_base = OTHER; note = 5-methyl cytidine
  modified_base 16: mod_base = OTHER; note = 5-methyl cytidine
  modified_base 18..19: mod_base = OTHER; note = 5-methyl cytidine
gctttccctgggcctctcct

SEQ ID NO: 4834 - RNA, 20 nt, synthetic construct
  source 1..20: mol_type = other RNA
  modified_base 1..20: mod_base = OTHER; note = Phosphorothioate linkage
  modified_base 1..5: mod_base = OTHER; note = 2'-O-(2-methoxyethyl) ribonucleotide
  modified_base 6: mod_base = OTHER; note = locked nucleic acid
  modified_base 7..8: mod_base = OTHER; note = 2'-O-(2-methoxyethyl) ribonucleotide
  modified_base 9: mod_base = OTHER; note = locked nucleic acid
  modified_base 10..11: mod_base = OTHER; note = 2'-O-(2-methoxyethyl) ribonucleotide
  modified_base 12: mod_base = OTHER; note = locked nucleic acid
  modified_base 13..14: mod_base = OTHER; note = 2'-O-(2-methoxyethyl) ribonucleotide
  modified_base 15: mod_base = OTHER; note = locked nucleic acid
  modified_base 16..20: mod_base = OTHER; note = 2'-O-(2-methoxyethyl) ribonucleotide
  modified_base 4: mod_base = OTHER; note = 5-methyl cytidine
  modified_base 8: mod_base = OTHER; note = 5-methyl cytidine
  modified_base 10: mod_base = OTHER; note = 5-methyl cytidine
  modified_base 13..14: mod_base = OTHER; note = 5-methyl cytidine
  modified_base 18..19: mod_base = OTHER; note = 5-methyl cytidine
gtgcagacactgccgttcct

SEQ ID NO: 4835 - RNA, 20 nt, synthetic construct
  source 1..20: mol_type = other RNA
  modified_base 1..20: mod_base = OTHER; note = Phosphorothioate linkage
  modified_base 1..5: mod_base = OTHER; note = 2'-O-(2-methoxyethyl) ribonucleotide
  modified_base 6: mod_base = OTHER; note = locked nucleic acid
  modified_base 7..8: mod_base = OTHER; note = 2'-O-(2-methoxyethyl) ribonucleotide
  modified_base 9: mod_base = OTHER; note = locked nucleic acid
  modified_base 10..11: mod_base = OTHER; note = 2'-O-(2-methoxyethyl) ribonucleotide
  modified_base 12: mod_base = OTHER; note = locked nucleic acid
  modified_base 13..14: mod_base = OTHER; note = 2'-O-(2-methoxyethyl) ribonucleotide
  modified_base 15: mod_base = OTHER; note = locked nucleic acid
  modified_base 16..20: mod_base = OTHER; note = 2'-O-(2-methoxyethyl) ribonucleotide
  modified_base 1..4: mod_base = OTHER; note = 5-methyl cytidine
  modified_base 9: mod_base = OTHER; note = 5-methyl cytidine
  modified_base 13: mod_base = OTHER; note = 5-methyl cytidine
  modified_base 15: mod_base = OTHER; note = 5-methyl cytidine
  modified_base 18..19: mod_base = OTHER; note = 5-methyl cytidine
cccctgtgcagacactgccg

SEQ ID NO: 4836 - RNA, 20 nt, synthetic construct
  source 1..20: mol_type = other RNA
  modified_base 1..20: mod_base = OTHER; note = Phosphorothioate linkage
  modified_base 1..5: mod_base = OTHER; note = 2'-O-(2-methoxyethyl) ribonucleotide
  modified_base 6: mod_base = OTHER; note = locked nucleic acid
  modified_base 7..8: mod_base = OTHER; note = 2'-O-(2-methoxyethyl) ribonucleotide
  modified_base 9: mod_base = OTHER; note = locked nucleic acid
  modified_base 10..11: mod_base = OTHER; note = 2'-O-(2-methoxyethyl) ribonucleotide
  modified_base 12: mod_base = OTHER; note = locked nucleic acid
  modified_base 13..14: mod_base = OTHER; note = 2'-O-(2-methoxyethyl) ribonucleotide
  modified_base 15: mod_base = OTHER; note = locked nucleic acid
  modified_base 16..20: mod_base = OTHER; note = 2'-O-(2-methoxyethyl) ribonucleotide
  modified_base 1..2: mod_base = OTHER; note = 5-methyl cytidine
  modified_base 5..8: mod_base = OTHER; note = 5-methyl cytidine
  modified_base 13: mod_base = OTHER; note = 5-methyl cytidine
  modified_base 17: mod_base = OTHER; note = 5-methyl cytidine
  modified_base 19: mod_base = OTHER; note = 5-methyl cytidine
ccatcccctgtgcagacact

SEQ ID NO: 4837 - RNA, 20 nt, synthetic construct
  source 1..20: mol_type = other RNA
  modified_base 1..20: mod_base = OTHER; note = Phosphorothioate linkage
  modified_base 1..5: mod_base = OTHER; note = 2'-O-(2-methoxyethyl) ribonucleotide
  modified_base 6: mod_base = OTHER; note = locked nucleic acid
  modified_base 7..8: mod_base = OTHER; note = 2'-O-(2-methoxyethyl) ribonucleotide
  modified_base 9: mod_base = OTHER; note = locked nucleic acid
  modified_base 10..11: mod_base = OTHER; note = 2'-O-(2-methoxyethyl) ribonucleotide
  modified_base 12: mod_base = OTHER; note = locked nucleic acid
  modified_base 13..14: mod_base = OTHER; note = 2'-O-(2-methoxyethyl) ribonucleotide
  modified_base 15: mod_base = OTHER; note = locked nucleic acid
  modified_base 16..20: mod_base = OTHER; note = 2'-O-(2-methoxyethyl) ribonucleotide
  modified_base 4: mod_base = OTHER; note = 5-methyl cytidine
  modified_base 6..7: mod_base = OTHER; note = 5-methyl cytidine
  modified_base 10..13: mod_base = OTHER; note = 5-methyl cytidine
  modified_base 18: mod_base = OTHER; note = 5-methyl cytidine
agtctccatcccctgtgcag

SEQ ID NO: 4838 - RNA, 20 nt, synthetic construct
  source 1..20: mol_type = other RNA
  modified_base 1..20: mod_base = OTHER; note = Phosphorothioate linkage
  modified_base 1..5: mod_base = OTHER; note = 2'-O-(2-methoxyethyl) ribonucleotide
  modified_base 6: mod_base = OTHER; note = locked nucleic acid
  modified_base 7..8: mod_base = OTHER; note = 2'-O-(2-methoxyethyl) ribonucleotide
  modified_base 9: mod_base = OTHER; note = locked nucleic acid
  modified_base 10..11: mod_base = OTHER; note = 2'-O-(2-methoxyethyl) ribonucleotide
  modified_base 12: mod_base = OTHER; note = locked nucleic acid
  modified_base 13..14: mod_base = OTHER; note = 2'-O-(2-methoxyethyl) ribonucleotide
  modified_base 15: mod_base = OTHER; note = locked nucleic acid
  modified_base 16..20: mod_base = OTHER; note = 2'-O-(2-methoxyethyl) ribonucleotide
  modified_base 1: mod_base = OTHER; note = 5-methyl cytidine
  modified_base 5: mod_base = OTHER; note = 5-methyl cytidine
  modified_base 7: mod_base = OTHER; note = 5-methyl cytidine
  modified_base 11: mod_base = OTHER; note = 5-methyl cytidine
  modified_base 14: mod_base = OTHER; note = 5-methyl cytidine
  modified_base 17: mod_base = OTHER; note = 5-methyl cytidine
cttgctcaggctgcagcagt

SEQ ID NO: 4839 - RNA, 20 nt, synthetic construct
  source 1..20: mol_type = other RNA
  modified_base 1..20: mod_base = OTHER; note = Phosphorothioate linkage
  modified_base 1..5: mod_base = OTHER; note = 2'-O-(2-methoxyethyl) ribonucleotide
  modified_base 6: mod_base = OTHER; note = locked nucleic acid
  modified_base 7..8: mod_base = OTHER; note = 2'-O-(2-methoxyethyl) ribonucleotide
  modified_base 9: mod_base = OTHER; note = locked nucleic acid
  modified_base 10..11: mod_base = OTHER; note = 2'-O-(2-methoxyethyl) ribonucleotide
  modified_base 12: mod_base = OTHER; note = locked nucleic acid
  modified_base 13..14: mod_base = OTHER; note = 2'-O-(2-methoxyethyl) ribonucleotide
  modified_base 15: mod_base = OTHER; note = locked nucleic acid
  modified_base 16..20: mod_base = OTHER; note = 2'-O-(2-methoxyethyl) ribonucleotide
  modified_base 4..5: mod_base = OTHER; note = 5-methyl cytidine
  modified_base 9: mod_base = OTHER; note = 5-methyl cytidine
  modified_base 11: mod_base = OTHER; note = 5-methyl cytidine
  modified_base 15: mod_base = OTHER; note = 5-methyl cytidine
  modified_base 18: mod_base = OTHER; note = 5-methyl cytidine
gttccttgctcaggctgcag

SEQ ID NO: 4840 - RNA, 20 nt, synthetic construct
  source 1..20: mol_type = other RNA
  modified_base 1..20: mod_base = OTHER; note = Phosphorothioate linkage
  modified_base 1..5: mod_base = OTHER; note = 2'-O-(2-methoxyethyl) ribonucleotide
  modified_base 6: mod_base = OTHER; note = locked nucleic acid
  modified_base 7..8: mod_base = OTHER; note = 2'-O-(2-methoxyethyl) ribonucleotide
  modified_base 9: mod_base = OTHER; note = locked nucleic acid
  modified_base 10..11: mod_base = OTHER; note = 2'-O-(2-methoxyethyl) ribonucleotide
  modified_base 12: mod_base = OTHER; note = locked nucleic acid
  modified_base 13..14: mod_base = OTHER; note = 2'-O-(2-methoxyethyl) ribonucleotide
  modified_base 15: mod_base = OTHER; note = locked nucleic acid
  modified_base 16..20: mod_base = OTHER; note = 2'-O-(2-methoxyethyl) ribonucleotide
  modified_base 2: mod_base = OTHER; note = 5-methyl cytidine
  modified_base 5: mod_base = OTHER; note = 5-methyl cytidine
  modified_base 7..8: mod_base = OTHER; note = 5-methyl cytidine
  modified_base 13..14: mod_base = OTHER; note = 5-methyl cytidine
  modified_base 18: mod_base = OTHER; note = 5-methyl cytidine
  modified_base 20: mod_base = OTHER; note = 5-methyl cytidine
tcagctccagttccttgctc

SEQ ID NO: 4841 - RNA, 20 nt, synthetic construct
  source 1..20: mol_type = other RNA
  modified_base 1..20: mod_base = OTHER; note = Phosphorothioate linkage
  modified_base 1..5: mod_base = OTHER; note = 2'-O-(2-methoxyethyl) ribonucleotide
  modified_base 6: mod_base = OTHER; note = locked nucleic acid
  modified_base 7..8: mod_base = OTHER; note = 2'-O-(2-methoxyethyl) ribonucleotide
  modified_base 9: mod_base = OTHER; note = locked nucleic acid
  modified_base 10..11: mod_base = OTHER; note = 2'-O-(2-methoxyethyl) ribonucleotide
  modified_base 12: mod_base = OTHER; note = locked nucleic acid
  modified_base 13..14: mod_base = OTHER; note = 2'-O-(2-methoxyethyl) ribonucleotide
  modified_base 15: mod_base = OTHER; note = locked nucleic acid
  modified_base 16..20: mod_base = OTHER; note = 2'-O-(2-methoxyethyl) ribonucleotide
  modified_base 7: mod_base = OTHER; note = 5-methyl cytidine
  modified_base 9..12: mod_base = OTHER; note = 5-methyl cytidine
ggttggctccccttttggga

SEQ ID NO: 4842 - RNA, 20 nt, synthetic construct
  source 1..20: mol_type = other RNA
  modified_base 1..20: mod_base = OTHER; note = Phosphorothioate linkage
  modified_base 1..5: mod_base = OTHER; note = 2'-O-(2-methoxyethyl) ribonucleotide
  modified_base 6: mod_base = OTHER; note = locked nucleic acid
  modified_base 7..8: mod_base = OTHER; note = 2'-O-(2-methoxyethyl) ribonucleotide
  modified_base 9: mod_base = OTHER; note = locked nucleic acid
  modified_base 10..11: mod_base = OTHER; note = 2'-O-(2-methoxyethyl) ribonucleotide
  modified_base 12: mod_base = OTHER; note = locked nucleic acid
  modified_base 13..14: mod_base = OTHER; note = 2'-O-(2-methoxyethyl) ribonucleotide
  modified_base 15: mod_base = OTHER; note = locked nucleic acid
  modified_base 16..20: mod_base = OTHER; note = 2'-O-(2-methoxyethyl) ribonucleotide
  modified_base 2..3: mod_base = OTHER; note = 5-methyl cytidine
  modified_base 5: mod_base = OTHER; note = 5-methyl cytidine
  modified_base 11..12: mod_base = OTHER; note = 5-methyl cytidine
  modified_base 15: mod_base = OTHER; note = 5-methyl cytidine
  modified_base 17: mod_base = OTHER; note = 5-methyl cytidine
gccactttttcctgctcatt

SEQ ID NO: 4843 - RNA, 20 nt, synthetic construct
  source 1..20: mol_type = other RNA
  modified_base 1..20: mod_base = OTHER; note = Phosphorothioate linkage
  modified_base 1..5: mod_base = OTHER; note = 2'-O-(2-methoxyethyl) ribonucleotide
  modified_base 6: mod_base = OTHER; note = locked nucleic acid
  modified_base 7..8: mod_base = OTHER; note = 2'-O-(2-methoxyethyl) ribonucleotide
  modified_base 9: mod_base = OTHER; note = locked nucleic acid
  modified_base 10..11: mod_base = OTHER; note = 2'-O-(2-methoxyethyl) ribonucleotide
  modified_base 12: mod_base = OTHER; note = locked nucleic acid
  modified_base 13..14: mod_base = OTHER; note = 2'-O-(2-methoxyethyl) ribonucleotide
  modified_base 15: mod_base = OTHER; note = locked nucleic acid
  modified_base 16..20: mod_base = OTHER; note = 2'-O-(2-methoxyethyl) ribonucleotide
  modified_base 1: mod_base = OTHER; note = 5-methyl cytidine
  modified_base 3..4: mod_base = OTHER; note = 5-methyl cytidine
  modified_base 10..11: mod_base = OTHER; note = 5-methyl cytidine
  modified_base 18: mod_base = OTHER; note = 5-methyl cytidine
ctccgagggcctgggaacga

SEQ ID NO: 4844 - RNA, 20 nt, synthetic construct
  source 1..20: mol_type = other RNA
  modified_base 1..20: mod_base = OTHER; note = Phosphorothioate linkage
  modified_base 1..5: mod_base = OTHER; note = 2'-O-(2-methoxyethyl) ribonucleotide
  modified_base 6: mod_base = OTHER; note = locked nucleic acid
  modified_base 7..8: mod_base = OTHER; note = 2'-O-(2-methoxyethyl) ribonucleotide
  modified_base 9: mod_base = OTHER; note = locked nucleic acid
  modified_base 10..11: mod_base = OTHER; note = 2'-O-(2-methoxyethyl) ribonucleotide
  modified_base 12: mod_base = OTHER; note = locked nucleic acid
  modified_base 13..14: mod_base = OTHER; note = 2'-O-(2-methoxyethyl) ribonucleotide
  modified_base 15: mod_base = OTHER; note = locked nucleic acid
  modified_base 16..20: mod_base = OTHER; note = 2'-O-(2-methoxyethyl) ribonucleotide
  modified_base 3..4: mod_base = OTHER; note = 5-methyl cytidine
  modified_base 12: mod_base = OTHER; note = 5-methyl cytidine
  modified_base 14: mod_base = OTHER; note = 5-methyl cytidine
  modified_base 16: mod_base = OTHER; note = 5-methyl cytidine
  modified_base 19..20: mod_base = OTHER; note = 5-methyl cytidine
agccggaggggcgcgcgacc

SEQ ID NO: 4845 - RNA, 20 nt, synthetic construct
  source 1..20: mol_type = other RNA
  modified_base 1..20: mod_base = OTHER; note = Phosphorothioate linkage
  modified_base 1..5: mod_base = OTHER; note = 2'-O-(2-methoxyethyl) ribonucleotide
  modified_base 6: mod_base = OTHER; note = locked nucleic acid
  modified_base 7..8: mod_base = OTHER; note = 2'-O-(2-methoxyethyl) ribonucleotide
  modified_base 9: mod_base = OTHER; note = locked nucleic acid
  modified_base 10..11: mod_base = OTHER; note = 2'-O-(2-methoxyethyl) ribonucleotide
  modified_base 12: mod_base = OTHER; note = locked nucleic acid
  modified_base 13..14: mod_base = OTHER; note = 2'-O-(2-methoxyethyl) ribonucleotide
  modified_base 15: mod_base = OTHER; note = locked nucleic acid
  modified_base 16..20: mod_base = OTHER; note = 2'-O-(2-methoxyethyl) ribonucleotide
  modified_base 10..12: mod_base = OTHER; note = 5-methyl cytidine
  modified_base 14: mod_base = OTHER; note = 5-methyl cytidine
  modified_base 17: mod_base = OTHER; note = 5-methyl cytidine
  modified_base 20: mod_base = OTHER; note = 5-methyl cytidine
tgggtggttcccgcggcggc

SEQ ID NO: 4846 - RNA, 20 nt, synthetic construct
  source 1..20: mol_type = other RNA
  modified_base 1..20: mod_base = OTHER; note = Phosphorothioate linkage
  modified_base 1..5: mod_base = OTHER; note = 2'-O-(2-methoxyethyl) ribonucleotide
  modified_base 6: mod_base = OTHER; note = locked nucleic acid
  modified_base 7..8: mod_base = OTHER; note = 2'-O-(2-methoxyethyl) ribonucleotide
  modified_base 9: mod_base = OTHER; note = locked nucleic acid
  modified_base 10..11: mod_base = OTHER; note = 2'-O-(2-methoxyethyl) ribonucleotide
  modified_base 12: mod_base = OTHER; note = locked nucleic acid
  modified_base 13..14: mod_base = OTHER; note = 2'-O-(2-methoxyethyl) ribonucleotide
  modified_base 15: mod_base = OTHER; note = locked nucleic acid
  modified_base 16..20: mod_base = OTHER; note = 2'-O-(2-methoxyethyl) ribonucleotide
  modified_base 4: mod_base = OTHER; note = 5-methyl cytidine
  modified_base 10..11: mod_base = OTHER; note = 5-methyl cytidine
  modified_base 13: mod_base = OTHER; note = 5-methyl cytidine
  modified_base 15..16: mod_base = OTHER; note = 5-methyl cytidine
  modified_base 20: mod_base = OTHER; note = 5-methyl cytidine
aagcagggaccacaccattc

SEQ ID NO: 4847 - RNA, 20 nt, synthetic construct
  source 1..20: mol_type = other RNA
  modified_base 1..20: mod_base = OTHER; note = Phosphorothioate linkage
  modified_base 1..5: mod_base = OTHER; note = 2'-O-(2-methoxyethyl) ribonucleotide
  modified_base 6: mod_base = OTHER; note = locked nucleic acid
  modified_base 7..8: mod_base = OTHER; note = 2'-O-(2-methoxyethyl) ribonucleotide
  modified_base 9: mod_base = OTHER; note = locked nucleic acid
  modified_base 10..11: mod_base = OTHER; note = 2'-O-(2-methoxyethyl) ribonucleotide
  modified_base 12: mod_base = OTHER; note = locked nucleic acid
  modified_base 13..14: mod_base = OTHER; note = 2'-O-(2-methoxyethyl) ribonucleotide
  modified_base 15: mod_base = OTHER; note = locked nucleic acid
  modified_base 16..20: mod_base = OTHER; note = 2'-O-(2-methoxyethyl) ribonucleotide
  modified_base 8: mod_base = OTHER; note = 5-methyl cytidine
  modified_base 12: mod_base = OTHER; note = 5-methyl cytidine
  modified_base 15..16: mod_base = OTHER; note = 5-methyl cytidine
  modified_base 18..20: mod_base = OTHER; note = 5-methyl cytidine
gaaggggctttctacctccc

SEQ ID NO: 4848 - RNA, 20 nt, synthetic construct
  source 1..20: mol_type = other RNA
  modified_base 1..20: mod_base = OTHER; note = Phosphorothioate linkage
  modified_base 1..5: mod_base = OTHER; note = 2'-O-(2-methoxyethyl) ribonucleotide
  modified_base 6: mod_base = OTHER; note = locked nucleic acid
  modified_base 7..8: mod_base = OTHER; note = 2'-O-(2-methoxyethyl) ribonucleotide
  modified_base 9: mod_base = OTHER; note = locked nucleic acid
  modified_base 10..11: mod_base = OTHER; note = 2'-O-(2-methoxyethyl) ribonucleotide
  modified_base 12: mod_base = OTHER; note = locked nucleic acid
  modified_base 13..14: mod_base = OTHER; note = 2'-O-(2-methoxyethyl) ribonucleotide
  modified_base 15: mod_base = OTHER; note = locked nucleic acid
  modified_base 16..20: mod_base = OTHER; note = 2'-O-(2-methoxyethyl) ribonucleotide
  modified_base 9: mod_base = OTHER; note = 5-methyl cytidine
  modified_base 15: mod_base = OTHER; note = 5-methyl cytidine
  modified_base 17..20: mod_base = OTHER; note = 5-methyl cytidine
agtaattgcagtgacgcccc

SEQ ID NO: 4849 - RNA, 20 nt, synthetic construct
  source 1..20: mol_type = other RNA
  modified_base 1..20: mod_base = OTHER; note = Phosphorothioate linkage
  modified_base 1..5: mod_base = OTHER; note = 2'-O-(2-methoxyethyl) ribonucleotide
  modified_base 6: mod_base = OTHER; note = locked nucleic acid
  modified_base 7..8: mod_base = OTHER; note = 2'-O-(2-methoxyethyl) ribonucleotide
  modified_base 9: mod_base = OTHER; note = locked nucleic acid
  modified_base 10..11: mod_base = OTHER; note = 2'-O-(2-methoxyethyl) ribonucleotide
  modified_base 12: mod_base = OTHER; note = locked nucleic acid
  modified_base 13..14: mod_base = OTHER; note = 2'-O-(2-methoxyethyl) ribonucleotide
  modified_base 15: mod_base = OTHER; note = locked nucleic acid
  modified_base 16..20: mod_base = OTHER; note = 2'-O-(2-methoxyethyl) ribonucleotide
  modified_base 2: mod_base = OTHER; note = 5-methyl cytidine
  modified_base 8: mod_base = OTHER; note = 5-methyl cytidine
  modified_base 10: mod_base = OTHER; note = 5-methyl cytidine
tctgatacactagggggagt

SEQ ID NO: 4850 - RNA, 20 nt, synthetic construct
  source 1..20: mol_type = other RNA
  modified_base 1..20: mod_base = OTHER; note = Phosphorothioate linkage
  modified_base 1..5: mod_base = OTHER; note = 2'-O-(2-methoxyethyl) ribonucleotide
  modified_base 6: mod_base = OTHER; note = locked nucleic acid
  modified_base 7..8: mod_base = OTHER; note = 2'-O-(2-methoxyethyl) ribonucleotide
  modified_base 9: mod_base = OTHER; note = locked nucleic acid
  modified_base 10..11: mod_base = OTHER; note = 2'-O-(2-methoxyethyl) ribonucleotide
  modified_base 12: mod_base = OTHER; note = locked nucleic acid
  modified_base 13..14: mod_base = OTHER; note = 2'-O-(2-methoxyethyl) ribonucleotide
  modified_base 15: mod_base = OTHER; note = locked nucleic acid
  modified_base 16..20: mod_base = OTHER; note = 2'-O-(2-methoxyethyl) ribonucleotide
  modified_base 4..5: mod_base = OTHER; note = 5-methyl cytidine
  modified_base 7: mod_base = OTHER; note = 5-methyl cytidine
  modified_base 11: mod_base = OTHER; note = 5-methyl cytidine
  modified_base 17: mod_base = OTHER; note = 5-methyl cytidine
  modified_base 19..20: mod_base = OTHER; note = 5-methyl cytidine
gaaccgcttactgaaactcc

SEQ ID NO: 4851 - RNA, 20 nt, synthetic construct
  source 1..20: mol_type = other RNA
  modified_base 1..20: mod_base = OTHER; note = Phosphorothioate linkage
  modified_base 1..5: mod_base = OTHER; note = 2'-O-(2-methoxyethyl) ribonucleotide
  modified_base 6: mod_base = OTHER; note = locked nucleic acid
  modified_base 7..8: mod_base = OTHER; note = 2'-O-(2-methoxyethyl) ribonucleotide
  modified_base 9: mod_base = OTHER; note = locked nucleic acid
  modified_base 10..11: mod_base = OTHER; note = 2'-O-(2-methoxyethyl) ribonucleotide
  modified_base 12: mod_base = OTHER; note = locked nucleic acid
  modified_base 13..14: mod_base = OTHER; note = 2'-O-(2-methoxyethyl) ribonucleotide
  modified_base 15: mod_base = OTHER; note = locked nucleic acid
  modified_base 16..20: mod_base = OTHER; note = 2'-O-(2-methoxyethyl) ribonucleotide
  modified_base 2..3: mod_base = OTHER; note = 5-methyl cytidine
  modified_base 5: mod_base = OTHER; note = 5-methyl cytidine
  modified_base 7: mod_base = OTHER; note = 5-methyl cytidine
  modified_base 11..12: mod_base = OTHER; note = 5-methyl cytidine
  modified_base 14: mod_base = OTHER; note = 5-methyl cytidine
  modified_base 16: mod_base = OTHER; note = 5-methyl cytidine
  modified_base 18..19: mod_base = OTHER; note = 5-methyl cytidine
gccgcgcagacctctcgcct

SEQ ID NO: 4852 - RNA, 20 nt, synthetic construct
  source 1..20: mol_type = other RNA
  modified_base 1..20: mod_base = OTHER; note = Phosphorothioate linkage
  modified_base 1..5: mod_base = OTHER; note = 2'-O-(2-methoxyethyl) ribonucleotide
  modified_base 6: mod_base = OTHER; note = locked nucleic acid
  modified_base 7..8: mod_base = OTHER; note = 2'-O-(2-methoxyethyl) ribonucleotide
  modified_base 9: mod_base = OTHER; note = locked nucleic acid
  modified_base 10..11: mod_base = OTHER; note = 2'-O-(2-methoxyethyl) ribonucleotide
  modified_base 12: mod_base = OTHER; note = locked nucleic acid
  modified_base 13..14: mod_base = OTHER; note = 2'-O-(2-methoxyethyl) ribonucleotide
  modified_base 15: mod_base = OTHER; note = locked nucleic acid
  modified_base 16..20: mod_base = OTHER; note = 2'-O-(2-methoxyethyl) ribonucleotide
  modified_base 1: mod_base = OTHER; note = 5-methyl cytidine
  modified_base 7..8: mod_base = OTHER; note = 5-methyl cytidine
  modified_base 10: mod_base = OTHER; note = 5-methyl cytidine
  modified_base 16: mod_base = OTHER; note = 5-methyl cytidine
  modified_base 20: mod_base = OTHER; note = 5-methyl cytidine
caaggaccgcggagtcggac

SEQ ID NO: 4853 - RNA, 20 nt, synthetic construct
  source 1..20: mol_type = other RNA
  modified_base 1..20: mod_base = OTHER; note = Phosphorothioate linkage
  modified_base 1..5: mod_base = OTHER; note = 2'-O-(2-methoxyethyl) ribonucleotide
  modified_base 6: mod_base = OTHER; note = locked nucleic acid
  modified_base 7..8: mod_base = OTHER; note = 2'-O-(2-methoxyethyl) ribonucleotide
  modified_base 9: mod_base = OTHER; note = locked nucleic acid
  modified_base 10..11: mod_base = OTHER; note = 2'-O-(2-methoxyethyl) ribonucleotide
  modified_base 12: mod_base = OTHER; note = locked nucleic acid
  modified_base 13..14: mod_base = OTHER; note = 2'-O-(2-methoxyethyl) ribonucleotide
  modified_base 15: mod_base = OTHER; note = locked nucleic acid
  modified_base 16..20: mod_base = OTHER; note = 2'-O-(2-methoxyethyl) ribonucleotide
  modified_base 4: mod_base = OTHER; note = 5-methyl cytidine
  modified_base 9: mod_base = OTHER; note = 5-methyl cytidine
  modified_base 11: mod_base = OTHER; note = 5-methyl cytidine
  modified_base 14..16: mod_base = OTHER; note = 5-methyl cytidine
agtctgagcgctacccggtt

SEQ ID NO: 4854 - RNA, 20 nt, synthetic construct
  source 1..20: mol_type = other RNA
  modified_base 1..20: mod_base = OTHER; note = Phosphorothioate linkage
  modified_base 1..5: mod_base = OTHER; note = 2'-O-(2-methoxyethyl) ribonucleotide
  modified_base 6: mod_base = OTHER; note = locked nucleic acid
  modified_base 7..8: mod_base = OTHER; note = 2'-O-(2-methoxyethyl) ribonucleotide
  modified_base 9: mod_base = OTHER; note = locked nucleic acid
  modified_base 10..11: mod_base = OTHER; note = 2'-O-(2-methoxyethyl) ribonucleotide
  modified_base 12: mod_base = OTHER; note = locked nucleic acid
  modified_base 13..14: mod_base = OTHER; note = 2'-O-(2-methoxyethyl) ribonucleotide
  modified_base 15: mod_base = OTHER; note = locked nucleic acid
  modified_base 16..20: mod_base = OTHER; note = 2'-O-(2-methoxyethyl) ribonucleotide
  modified_base 8: mod_base = OTHER; note = 5-methyl cytidine
  modified_base 13: mod_base = OTHER; note = 5-methyl cytidine
  modified_base 16: mod_base = OTHER; note = 5-methyl cytidine
  modified_base 18: mod_base = OTHER; note = 5-methyl cytidine
  modified_base 20: mod_base = OTHER; note = 5-methyl cytidine
aggtaggcgggtcatcgcgc

SEQ ID NO: 4855 - RNA, 20 nt, synthetic construct
  source 1..20: mol_type = other RNA
  modified_base 1..20: mod_base = OTHER; note = Phosphorothioate linkage
  modified_base 1..5: mod_base = OTHER; note = 2'-O-(2-methoxyethyl) ribonucleotide
  modified_base 6: mod_base = OTHER; note = locked nucleic acid
  modified_base 7..8: mod_base = OTHER; note = 2'-O-(2-methoxyethyl) ribonucleotide
  modified_base 9: mod_base = OTHER; note = locked nucleic acid
  modified_base 10..11: mod_base = OTHER; note = 2'-O-(2-methoxyethyl) ribonucleotide
  modified_base 12: mod_base = OTHER; note = locked nucleic acid
  modified_base 13..14: mod_base = OTHER; note = 2'-O-(2-methoxyethyl) ribonucleotide
  modified_base 15: mod_base = OTHER; note = locked nucleic acid
  modified_base 16..20: mod_base = OTHER; note = 2'-O-(2-methoxyethyl) ribonucleotide
  modified_base 3: mod_base = OTHER; note = 5-methyl cytidine
  modified_base 10..12: mod_base = OTHER; note = 5-methyl cytidine
  modified_base 17..19: mod_base = OTHER; note = 5-methyl cytidine
agcgggtagccctgatccct

SEQ ID NO: 4856 - RNA, 20 nt, synthetic construct
  source 1..20: mol_type = other RNA
  modified_base 1..20: mod_base = OTHER; note = Phosphorothioate linkage
  modified_base 1..5: mod_base = OTHER; note = 2'-O-(2-methoxyethyl) ribonucleotide
  modified_base 6: mod_base = OTHER; note = locked nucleic acid
  modified_base 7..8: mod_base = OTHER; note = 2'-O-(2-methoxyethyl) ribonucleotide
  modified_base 9: mod_base = OTHER; note = locked nucleic acid
  modified_base 10..11: mod_base = OTHER; note = 2'-O-(2-methoxyethyl) ribonucleotide
  modified_base 12: mod_base = OTHER; note = locked nucleic acid
  modified_base 13..14: mod_base = OTHER; note = 2'-O-(2-methoxyethyl) ribonucleotide
  modified_base 15: mod_base = OTHER; note = locked nucleic acid
  modified_base 16..20: mod_base = OTHER; note = 2'-O-(2-methoxyethyl) ribonucleotide
  modified_base 1..2: mod_base = OTHER; note = 5-methyl cytidine
  modified_base 4: mod_base = OTHER; note = 5-methyl cytidine
  modified_base 20: mod_base = OTHER; note = 5-methyl cytidine
cctctatattgataagtagc

SEQ ID NO: 4857 - RNA, 20 nt, synthetic construct
  source 1..20: mol_type = other RNA
  modified_base 1..20: mod_base = OTHER; note = Phosphorothioate linkage
  modified_base 1..5: mod_base = OTHER; note = 2'-O-(2-methoxyethyl) ribonucleotide
  modified_base 6: mod_base = OTHER; note = locked nucleic acid
  modified_base 7..8: mod_base = OTHER; note = 2'-O-(2-methoxyethyl) ribonucleotide
  modified_base 9: mod_base = OTHER; note = locked nucleic acid
  modified_base 10..11: mod_base = OTHER; note = 2'-O-(2-methoxyethyl) ribonucleotide
  modified_base 12: mod_base = OTHER; note = locked nucleic acid
  modified_base 13..14: mod_base = OTHER; note = 2'-O-(2-methoxyethyl) ribonucleotide
  modified_base 15: mod_base = OTHER; note = locked nucleic acid
  modified_base 16..20: mod_base = OTHER; note = 2'-O-(2-methoxyethyl) ribonucleotide
gagtgatttgagtagaaaag

SEQ ID NO: 4858 - RNA, 20 nt, synthetic construct
  source 1..20: mol_type = other RNA
  modified_base 1..20: mod_base = OTHER; note = Phosphorothioate linkage
  modified_base 1..5: mod_base = OTHER; note = 2'-O-(2-methoxyethyl) ribonucleotide
  modified_base 6: mod_base = OTHER; note = locked nucleic acid
  modified_base 7..8: mod_base = OTHER; note = 2'-O-(2-methoxyethyl) ribonucleotide
  modified_base 9: mod_base = OTHER; note = locked nucleic acid
  modified_base 10..11: mod_base = OTHER; note = 2'-O-(2-methoxyethyl) ribonucleotide
  modified_base 12: mod_base = OTHER; note = locked nucleic acid
  modified_base 13..14: mod_base = OTHER; note = 2'-O-(2-methoxyethyl) ribonucleotide
  modified_base 15: mod_base = OTHER; note = locked nucleic acid
  modified_base 16..20: mod_base = OTHER; note = 2'-O-(2-methoxyethyl) ribonucleotide
  modified_base 4..6: mod_base = OTHER; note = 5-methyl cytidine
gatccctagaaatggggtgt

SEQ ID NO: 4859 - RNA, 20 nt, synthetic construct
  source 1..20: mol_type = other RNA
  modified_base 1..20: mod_base = OTHER; note = Phosphorothioate linkage
  modified_base 1..5: mod_base = OTHER; note = 2'-O-(2-methoxyethyl) ribonucleotide
  modified_base 6: mod_base = OTHER; note = locked nucleic acid
  modified_base 7..8: mod_base = OTHER; note = 2'-O-(2-methoxyethyl) ribonucleotide
  modified_base 9: mod_base = OTHER; note = locked nucleic acid
  modified_base 10..11: mod_base = OTHER; note = 2'-O-(2-methoxyethyl) ribonucleotide
  modified_base 12: mod_base = OTHER; note = locked nucleic acid
  modified_base 13..14: mod_base = OTHER; note = 2'-O-(2-methoxyethyl) ribonucleotide
  modified_base 15: mod_base = OTHER; note = locked nucleic acid
  modified_base 16..20: mod_base = OTHER; note = 2'-O-(2-methoxyethyl) ribonucleotide
  modified_base 1: mod_base = OTHER; note = 5-methyl cytidine
  modified_base 4: mod_base = OTHER; note = 5-methyl cytidine
  modified_base 7: mod_base = OTHER; note = 5-methyl cytidine
  modified_base 9: mod_base = OTHER; note = 5-methyl cytidine
  modified_base 16: mod_base = OTHER; note = 5-methyl cytidine
  modified_base 18..19: mod_base = OTHER; note = 5-methyl cytidine
cgacgtcacatgattctcca

SEQ ID NO: 4860 - RNA, 20 nt, synthetic construct
  source 1..20: mol_type = other RNA
  modified_base 1..20: mod_base = OTHER; note = Phosphorothioate linkage
  modified_base 1..5: mod_base = OTHER; note = 2'-O-(2-methoxyethyl) ribonucleotide
  modified_base 6: mod_base = OTHER; note = locked nucleic acid
  modified_base 7..8: mod_base = OTHER; note = 2'-O-(2-methoxyethyl) ribonucleotide
  modified_base 9: mod_base = OTHER; note = locked nucleic acid
  modified_base 10..11: mod_base = OTHER; note = 2'-O-(2-methoxyethyl) ribonucleotide
  modified_base 12: mod_base = OTHER; note = locked nucleic acid
  modified_base 13..14: mod_base = OTHER; note = 2'-O-(2-methoxyethyl) ribonucleotide
  modified_base 15: mod_base = OTHER; note = locked nucleic acid
  modified_base 16..20: mod_base = OTHER; note = 2'-O-(2-methoxyethyl) ribonucleotide
  modified_base 10: mod_base = OTHER; note = 5-methyl cytidine
  modified_base 13: mod_base = OTHER; note = 5-methyl cytidine
  modified_base 17: mod_base = OTHER; note = 5-methyl cytidine
  modified_base 19..20: mod_base = OTHER; note = 5-methyl cytidine
taaggaaggcgacgagcacc

SEQ ID NO: 4861 - RNA, 20 nt, synthetic construct
  source 1..20: mol_type = other RNA
  modified_base 1..20: mod_base = OTHER; note = Phosphorothioate linkage
  modified_base 1..5: mod_base = OTHER; note = 2'-O-(2-methoxyethyl) ribonucleotide
  modified_base 6: mod_base = OTHER; note = locked nucleic acid
  modified_base 7..8: mod_base = OTHER; note = 2'-O-(2-methoxyethyl) ribonucleotide
  modified_base 9: mod_base = OTHER; note = locked nucleic acid
  modified_base 10..11: mod_base = OTHER; note = 2'-O-(2-methoxyethyl) ribonucleotide
  modified_base 12: mod_base = OTHER; note = locked nucleic acid
  modified_base 13..14: mod_base = OTHER; note = 2'-O-(2-methoxyethyl) ribonucleotide
  modified_base 15: mod_base = OTHER; note = locked nucleic acid
  modified_base 16..20: mod_base = OTHER; note = 2'-O-(2-methoxyethyl) ribonucleotide
  modified_base 5..8: mod_base = OTHER; note = 5-methyl cytidine
  modified_base 12: mod_base = OTHER; note = 5-methyl cytidine
  modified_base 14: mod_base = OTHER; note = 5-methyl cytidine
  modified_base 16: mod_base = OTHER; note = 5-methyl cytidine
  modified_base 18: mod_base = OTHER; note = 5-methyl cytidine
aatgccccagacacgcgcta

SEQ ID NO: 4862 - RNA, 20 nt, synthetic construct
  source 1..20: mol_type = other RNA
  modified_base 1..20: mod_base = OTHER; note = Phosphorothioate linkage
  modified_base 1..5: mod_base = OTHER; note = 2'-O-(2-methoxyethyl) ribonucleotide
  modified_base 6: mod_base = OTHER; note = locked nucleic acid
  modified_base 7..8: mod_base = OTHER; note = 2'-O-(2-methoxyethyl) ribonucleotide
  modified_base 9: mod_base = OTHER; note = locked nucleic acid
  modified_base 10..11: mod_base = OTHER; note = 2'-O-(2-methoxyethyl) ribonucleotide
  modified_base 12: mod_base = OTHER; note = locked nucleic acid
  modified_base 13..14: mod_base = OTHER; note = 2'-O-(2-methoxyethyl) ribonucleotide
  modified_base 15: mod_base = OTHER; note = locked nucleic acid
  modified_base 16..20: mod_base = OTHER; note = 2'-O-(2-methoxyethyl) ribonucleotide
  modified_base 6: mod_base = OTHER; note = 5-methyl cytidine
  modified_base 10: mod_base = OTHER; note = 5-methyl cytidine
  modified_base 12: mod_base = OTHER; note = 5-methyl cytidine
  modified_base 20: mod_base = OTHER; note = 5-methyl cytidine
aaaggcgagcacaaatattc

SEQ ID NO: 4863 - RNA, 20 nt, synthetic construct
  source 1..20: mol_type = other RNA
  modified_base 1..20: mod_base = OTHER; note = Phosphorothioate linkage
  modified_base 1..5: mod_base = OTHER; note = 2'-O-(2-methoxyethyl) ribonucleotide
  modified_base 6: mod_base = OTHER; note = locked nucleic acid
  modified_base 7..8: mod_base = OTHER; note = 2'-O-(2-methoxyethyl) ribonucleotide
  modified_base 9: mod_base = OTHER; note = locked nucleic acid
  modified_base 10..11: mod_base = OTHER; note = 2'-O-(2-methoxyethyl) ribonucleotide
  modified_base 12: mod_base = OTHER; note = locked nucleic acid
  modified_base 13..14: mod_base = OTHER; note = 2'-O-(2-methoxyethyl) ribonucleotide
  modified_base 15: mod_base = OTHER; note = locked nucleic acid
  modified_base 16..20: mod_base = OTHER; note = 2'-O-(2-methoxyethyl) ribonucleotide
  modified_base 1: mod_base = OTHER; note = 5-methyl cytidine
  modified_base 6: mod_base = OTHER; note = 5-methyl cytidine
  modified_base 10: mod_base = OTHER; note = 5-methyl cytidine
  modified_base 14: mod_base = OTHER; note = 5-methyl cytidine
cagaacaaacaaacaaaagg

SEQ ID NO: 4864 - RNA, 20 nt, synthetic construct
  source 1..20: mol_type = other RNA
  modified_base 1..20: mod_base = OTHER; note = Phosphorothioate linkage
  modified_base 1..5: mod_base = OTHER; note = 2'-O-(2-methoxyethyl) ribonucleotide
  modified_base 6: mod_base = OTHER; note = locked nucleic acid
  modified_base 7..8: mod_base = OTHER; note = 2'-O-(2-methoxyethyl) ribonucleotide
  modified_base 9: mod_base = OTHER; note = locked nucleic acid
  modified_base 10..11: mod_base = OTHER; note = 2'-O-(2-methoxyethyl) ribonucleotide
  modified_base 12: mod_base = OTHER; note = locked nucleic acid
  modified_base 13..14: mod_base = OTHER; note = 2'-O-(2-methoxyethyl) ribonucleotide
  modified_base 15: mod_base = OTHER; note = locked nucleic acid
  modified_base 16..20: mod_base = OTHER; note = 2'-O-(2-methoxyethyl) ribonucleotide
  modified_base 3: mod_base = OTHER; note = 5-methyl cytidine
  modified_base 5: mod_base = OTHER; note = 5-methyl cytidine
  modified_base 7: mod_base = OTHER; note = 5-methyl cytidine
  modified_base 12..13: mod_base = OTHER; note = 5-methyl cytidine
  modified_base 17: mod_base = OTHER; note = 5-methyl cytidine
  modified_base 19: mod_base = OTHER; note = 5-methyl cytidine
aacacacaagtccgggcgcg

SEQ ID NO: 4865 - RNA, 20 nt, synthetic construct
  source 1..20: mol_type = other RNA
  modified_base 1..20: mod_base = OTHER; note = Phosphorothioate linkage
  modified_base 1..5: mod_base = OTHER; note = 2'-O-(2-methoxyethyl) ribonucleotide
  modified_base 6: mod_base = OTHER; note = locked nucleic acid
  modified_base 7..8: mod_base = OTHER; note = 2'-O-(2-methoxyethyl) ribonucleotide
  modified_base 9: mod_base = OTHER; note = locked nucleic acid
  modified_base 10..11: mod_base = OTHER; note = 2'-O-(2-methoxyethyl) ribonucleotide
  modified_base 12: mod_base = OTHER; note = locked nucleic acid
  modified_base 13..14: mod_base = OTHER; note = 2'-O-(2-methoxyethyl) ribonucleotide
  modified_base 15: mod_base = OTHER; note = locked nucleic acid
  modified_base 16..20: mod_base = OTHER; note = 2'-O-(2-methoxyethyl) ribonucleotide
  modified_base 6: mod_base = OTHER; note = 5-methyl cytidine
  modified_base 13: mod_base = OTHER; note = 5-methyl cytidine
  modified_base 16: mod_base = OTHER; note = 5-methyl cytidine
gtgagctatgatcagcttgg

SEQ ID NO: 4866 - RNA, 20 nt, synthetic construct
  source 1..20: mol_type = other RNA
  modified_base 1..20: mod_base = OTHER; note = Phosphorothioate linkage
  modified_base 1..5: mod_base = OTHER; note = 2'-O-(2-methoxyethyl) ribonucleotide
  modified_base 6: mod_base = OTHER; note = locked nucleic acid
  modified_base 7..8: mod_base = OTHER; note = 2'-O-(2-methoxyethyl) ribonucleotide
  modified_base 9: mod_base = OTHER; note = locked nucleic acid
  modified_base 10..11: mod_base = OTHER; note = 2'-O-(2-methoxyethyl) ribonucleotide
  modified_base 12: mod_base = OTHER; note = locked nucleic acid
  modified_base 13..14: mod_base = OTHER; note = 2'-O-(2-methoxyethyl) ribonucleotide
  modified_base 15: mod_base = OTHER; note = locked nucleic acid
  modified_base 16..20: mod_base = OTHER; note = 2'-O-(2-methoxyethyl) ribonucleotide
  modified_base 6: mod_base = OTHER; note = 5-methyl cytidine
  modified_base 8: mod_base = OTHER; note = 5-methyl cytidine
  modified_base 17: mod_base = OTHER; note = 5-methyl cytidine
agaatcgctttgggagcagg

SEQ ID NO: 4867 - RNA, 20 nt, synthetic construct
  source 1..20: mol_type = other RNA
  modified_base 1..20: mod_base = OTHER; note = Phosphorothioate linkage
  modified_base 1..5: mod_base = OTHER; note = 2'-O-(2-methoxyethyl) ribonucleotide
  modified_base 6: mod_base = OTHER; note = locked nucleic acid
  modified_base 7..8: mod_base = OTHER; note = 2'-O-(2-methoxyethyl) ribonucleotide
  modified_base 9: mod_base = OTHER; note = locked nucleic acid
  modified_base 10..11: mod_base = OTHER; note = 2'-O-(2-methoxyethyl) ribonucleotide
  modified_base 12: mod_base = OTHER; note = locked nucleic acid
  modified_base 13..14: mod_base = OTHER; note = 2'-O-(2-methoxyethyl) ribonucleotide
  modified_base 15: mod_base = OTHER; note = locked nucleic acid
  modified_base 16..20: mod_base = OTHER; note = 2'-O-(2-methoxyethyl) ribonucleotide
  modified_base 1: mod_base = OTHER; note = 5-methyl cytidine
  modified_base 11..13: mod_base = OTHER; note = 5-methyl cytidine
  modified_base 16: mod_base = OTHER; note = 5-methyl cytidine
  modified_base 18..19: mod_base = OTHER; note = 5-methyl cytidine
catttgtaatcccagcgcct

SEQ ID NO: 4868 - RNA, 20 nt, synthetic construct
  source 1..20: mol_type = other RNA
  modified_base 1..20: mod_base = OTHER; note = Phosphorothioate linkage
  modified_base 1..5: mod_base = OTHER; note = 2'-O-(2-methoxyethyl) ribonucleotide
  modified_base 6: mod_base = OTHER; note = locked nucleic acid
  modified_base 7..8: mod_base = OTHER; note = 2'-O-(2-methoxyethyl) ribonucleotide
  modified_base 9: mod_base = OTHER; note = locked nucleic acid
  modified_base 10..11: mod_base = OTHER; note = 2'-O-(2-methoxyethyl) ribonucleotide
  modified_base 12: mod_base = OTHER; note = locked nucleic acid
  modified_base 13..14: mod_base = OTHER; note = 2'-O-(2-methoxyethyl) ribonucleotide
  modified_base 15: mod_base = OTHER; note = locked nucleic acid
  modified_base 16..20: mod_base = OTHER; note = 2'-O-(2-methoxyethyl) ribonucleotide
  modified_base 6: mod_base = OTHER; note = 5-methyl cytidine
  modified_base 10..11: mod_base = OTHER; note = 5-methyl cytidine
  modified_base 14: mod_base = OTHER; note = 5-methyl cytidine
  modified_base 16: mod_base = OTHER; note = 5-methyl cytidine
aggagcgagccagctcagta

SEQ ID NO: 4869 - RNA, 20 nt, synthetic construct
  source 1..20: mol_type = other RNA
  modified_base 1..20: mod_base = OTHER; note = Phosphorothioate linkage
  modified_base 1..5: mod_base = OTHER; note = 2'-O-(2-methoxyethyl) ribonucleotide
  modified_base 6: mod_base = OTHER; note = locked nucleic acid
  modified_base 7..8: mod_base = OTHER; note = 2'-O-(2-methoxyethyl) ribonucleotide
  modified_base 9: mod_base = OTHER; note = locked nucleic acid
  modified_base 10..11: mod_base = OTHER; note = 2'-O-(2-methoxyethyl) ribonucleotide
  modified_base 12: mod_base = OTHER; note = locked nucleic acid
  modified_base 13..14: mod_base = OTHER; note = 2'-O-(2-methoxyethyl) ribonucleotide
  modified_base 15: mod_base = OTHER; note = locked nucleic acid
  modified_base 16..20: mod_base = OTHER; note = 2'-O-(2-methoxyethyl) ribonucleotide
  modified_base 9: mod_base = OTHER; note = 5-methyl cytidine
  modified_base 14: mod_base = OTHER; note = 5-methyl cytidine
  modified_base 19: mod_base = OTHER; note = 5-methyl cytidine
gaatagggcaggacaggaca

SEQ ID NO: 4870 - RNA, 20 nt, synthetic construct
  source 1..20: mol_type = other RNA
  modified_base 1..20: mod_base = OTHER; note = Phosphorothioate linkage
  modified_base 1..5: mod_base = OTHER; note = 2'-O-(2-methoxyethyl) ribonucleotide
  modified_base 6: mod_base = OTHER; note = locked nucleic acid
  modified_base 7..8: mod_base = OTHER; note = 2'-O-(2-methoxyethyl) ribonucleotide
  modified_base 9: mod_base = OTHER; note = locked nucleic acid
  modified_base 10..11: mod_base = OTHER; note = 2'-O-(2-methoxyethyl) ribonucleotide
  modified_base 12: mod_base = OTHER; note = locked nucleic acid
  modified_base 13..14: mod_base = OTHER; note = 2'-O-(2-methoxyethyl) ribonucleotide
  modified_base 15: mod_base = OTHER; note = locked nucleic acid
  modified_base 16..20: mod_base = OTHER; note = 2'-O-(2-methoxyethyl) ribonucleotide
  modified_base 5: mod_base = OTHER; note = 5-methyl cytidine
  modified_base 8..9: mod_base = OTHER; note = 5-methyl cytidine
atgtcaaccgagtttggaga

SEQ ID NO: 4871 - RNA, 20 nt, synthetic construct
  source 1..20: mol_type = other RNA
  modified_base 1..20: mod_base = OTHER; note = Phosphorothioate linkage
  modified_base 1..5: mod_base = OTHER; note = 2'-O-(2-methoxyethyl) ribonucleotide
  modified_base 6: mod_base = OTHER; note = locked nucleic acid
  modified_base 7..8: mod_base = OTHER; note = 2'-O-(2-methoxyethyl) ribonucleotide
  modified_base 9: mod_base = OTHER; note = locked nucleic acid
  modified_base 10..11: mod_base = OTHER; note = 2'-O-(2-methoxyethyl) ribonucleotide
  modified_base 12: mod_base = OTHER; note = locked nucleic acid
  modified_base 13..14: mod_base = OTHER; note = 2'-O-(2-methoxyethyl) ribonucleotide
  modified_base 15: mod_base = OTHER; note = locked nucleic acid
  modified_base 16..20: mod_base = OTHER; note = 2'-O-(2-methoxyethyl) ribonucleotide
  modified_base 3: mod_base = OTHER; note = 5-methyl cytidine
  modified_base 6: mod_base = OTHER; note = 5-methyl cytidine
  modified_base 8: mod_base = OTHER; note = 5-methyl cytidine
  modified_base 10: mod_base = OTHER; note = 5-methyl cytidine
  modified_base 12: mod_base = OTHER; note = 5-methyl cytidine
  modified_base 18..19: mod_base = OTHER; note = 5-methyl cytidine
ttcaactcactctggggcct

SEQ ID NO: 4872 - RNA, 20 nt, synthetic construct
  source 1..20: mol_type = other RNA
  modified_base 1..20: mod_base = OTHER; note = Phosphorothioate linkage
  modified_base 1..5: mod_base = OTHER; note = 2'-O-(2-methoxyethyl) ribonucleotide
  modified_base 6: mod_base = OTHER; note = locked nucleic acid
  modified_base 7..8: mod_base = OTHER; note = 2'-O-(2-methoxyethyl) ribonucleotide
  modified_base 9: mod_base = OTHER; note = locked nucleic acid
  modified_base 10..11: mod_base = OTHER; note = 2'-O-(2-methoxyethyl) ribonucleotide
  modified_base 12: mod_base = OTHER; note = locked nucleic acid
  modified_base 13..14: mod_base = OTHER; note = 2'-O-(2-methoxyethyl) ribonucleotide
  modified_base 15: mod_base = OTHER; note = locked nucleic acid
  modified_base 16..20: mod_base = OTHER; note = 2'-O-(2-methoxyethyl) ribonucleotide
  modified_base 4: mod_base = OTHER; note = 5-methyl cytidine
  modified_base 12: mod_base = OTHER; note = 5-methyl cytidine
  modified_base 20: mod_base = OTHER; note = 5-methyl cytidine
gggctttggggctgtttatc

SEQ ID NO: 4873 - RNA, 20 nt, synthetic construct
  source 1..20: mol_type = other RNA
  modified_base 1..20: mod_base = OTHER; note = Phosphorothioate linkage
  modified_base 1..5: mod_base = OTHER; note = 2'-O-(2-methoxyethyl) ribonucleotide
  modified_base 6: mod_base = OTHER; note = locked nucleic acid
  modified_base 7..8: mod_base = OTHER; note = 2'-O-(2-methoxyethyl) ribonucleotide
  modified_base 9: mod_base = OTHER; note = locked nucleic acid
  modified_base 10..11: mod_base = OTHER; note = 2'-O-(2-methoxyethyl) ribonucleotide
  modified_base 12: mod_base = OTHER; note = locked nucleic acid
  modified_base 13..14: mod_base = OTHER; note = 2'-O-(2-methoxyethyl) ribonucleotide
  modified_base 15: mod_base = OTHER; note = locked nucleic acid
  modified_base 16..20: mod_base = OTHER; note = 2'-O-(2-methoxyethyl) ribonucleotide
  modified_base 4..6: mod_base = OTHER; note = 5-methyl cytidine
  modified_base 9: mod_base = OTHER; note = 5-methyl cytidine
  modified_base 11..13: mod_base = OTHER; note = 5-methyl cytidine
  modified_base 17..18: mod_base = OTHER; note = 5-methyl cytidine
aatccctgctccctgtcctg

SEQ ID NO: 4874 - RNA, 20 nt, synthetic construct
  source 1..20: mol_type = other RNA
  modified_base 1..20: mod_base = OTHER; note = Phosphorothioate linkage
  modified_base 1..5: mod_base = OTHER; note = 2'-O-(2-methoxyethyl) ribonucleotide
  modified_base 6: mod_base = OTHER; note = locked nucleic acid
  modified_base 7..8: mod_base = OTHER; note = 2'-O-(2-methoxyethyl) ribonucleotide
  modified_base 9: mod_base = OTHER; note = locked nucleic acid
  modified_base 10..11: mod_base = OTHER; note = 2'-O-(2-methoxyethyl) ribonucleotide
  modified_base 12: mod_base = OTHER; note = locked nucleic acid
  modified_base 13..14: mod_base = OTHER; note = 2'-O-(2-methoxyethyl) ribonucleotide
  modified_base 15: mod_base = OTHER; note = locked nucleic acid
  modified_base 16..20: mod_base = OTHER; note = 2'-O-(2-methoxyethyl) ribonucleotide
  modified_base 9: mod_base = OTHER; note = 5-methyl cytidine
  modified_base 12..13: mod_base = OTHER; note = 5-methyl cytidine
  modified_base 19: mod_base = OTHER; note = 5-methyl cytidine
attagattcagcctgagact

SEQ ID NO: 4875 - RNA, 20 nt, synthetic construct
  source 1..20: mol_type = other RNA
  modified_base 1..20: mod_base = OTHER; note = Phosphorothioate linkage
  modified_base 1..5: mod_base = OTHER; note = 2'-O-(2-methoxyethyl) ribonucleotide
  modified_base 6: mod_base = OTHER; note = locked nucleic acid
  modified_base 7..8: mod_base = OTHER; note = 2'-O-(2-methoxyethyl) ribonucleotide
  modified_base 9: mod_base = OTHER; note = locked nucleic acid
  modified_base 10..11: mod_base = OTHER; note = 2'-O-(2-methoxyethyl) ribonucleotide
  modified_base 12: mod_base = OTHER; note = locked nucleic acid
  modified_base 13..14: mod_base = OTHER; note = 2'-O-(2-methoxyethyl) ribonucleotide
  modified_base 15: mod_base = OTHER; note = locked nucleic acid
  modified_base 16..20: mod_base = OTHER; note = 2'-O-(2-methoxyethyl) ribonucleotide
  modified_base 3: mod_base = OTHER; note = 5-methyl cytidine
  modified_base 5..6: mod_base = OTHER; note = 5-methyl cytidine
  modified_base 10: mod_base = OTHER; note = 5-methyl cytidine
  modified_base 13: mod_base = OTHER; note = 5-methyl cytidine
  modified_base 17: mod_base = OTHER; note = 5-methyl cytidine
  modified_base 19: mod_base = OTHER; note = 5-methyl cytidine
tacacctggcaactggcgca

SEQ ID NO: 4876 - RNA, 20 nt, synthetic construct
  source 1..20: mol_type = other RNA
  modified_base 1..20: mod_base = OTHER; note = Phosphorothioate linkage
  modified_base 1..5: mod_base = OTHER; note = 2'-O-(2-methoxyethyl) ribonucleotide
  modified_base 6: mod_base = OTHER; note = locked nucleic acid
  modified_base 7..8: mod_base = OTHER; note = 2'-O-(2-methoxyethyl) ribonucleotide
  modified_base 9: mod_base = OTHER; note = locked nucleic acid
  modified_base 10..11: mod_base = OTHER; note = 2'-O-(2-methoxyethyl) ribonucleotide
  modified_base 12: mod_base = OTHER; note = locked nucleic acid
  modified_base 13..14: mod_base = OTHER; note = 2'-O-(2-methoxyethyl) ribonucleotide
  modified_base 15: mod_base = OTHER; note = locked nucleic acid
  modified_base 16..20: mod_base = OTHER; note = 2'-O-(2-methoxyethyl) ribonucleotide
  modified_base 1..2: mod_base = OTHER; note = 5-methyl cytidine
  modified_base 9: mod_base = OTHER; note = 5-methyl cytidine
  modified_base 13: mod_base = OTHER; note = 5-methyl cytidine
  modified_base 16: mod_base = OTHER; note = 5-methyl cytidine
  modified_base 19..20: mod_base = OTHER; note = 5-methyl cytidine
cctggagacaatctacttcc

SEQ ID NO: 4877 - RNA, 20 nt, synthetic construct
  source 1..20: mol_type = other RNA
  modified_base 1..20: mod_base = OTHER; note = Phosphorothioate linkage
  modified_base 1..5: mod_base = OTHER; note = 2'-O-(2-methoxyethyl) ribonucleotide
  modified_base 6: mod_base = OTHER; note = locked nucleic acid
  modified_base 7..8: mod_base = OTHER; note = 2'-O-(2-methoxyethyl) ribonucleotide
  modified_base 9: mod_base = OTHER; note = locked nucleic acid
  modified_base 10..11: mod_base = OTHER; note = 2'-O-(2-methoxyethyl) ribonucleotide
  modified_base 12: mod_base = OTHER; note = locked nucleic acid
  modified_base 13..14: mod_base = OTHER; note = 2'-O-(2-methoxyethyl) ribonucleotide
  modified_base 15: mod_base = OTHER; note = locked nucleic acid
  modified_base 16..20: mod_base = OTHER; note = 2'-O-(2-methoxyethyl) ribonucleotide
  modified_base 13: mod_base = OTHER; note = 5-methyl cytidine
  modified_base 15: mod_base = OTHER; note = 5-methyl cytidine
  modified_base 18: mod_base = OTHER; note = 5-methyl cytidine
gtggaatgaaatctcttctt

SEQ ID NO: 4878 - RNA, 20 nt, synthetic construct
  source 1..20: mol_type = other RNA
  modified_base 1..20: mod_base = OTHER; note = Phosphorothioate linkage
  modified_base 1..5: mod_base = OTHER; note = 2'-O-(2-methoxyethyl) ribonucleotide
  modified_base 6: mod_base = OTHER; note = locked nucleic acid
  modified_base 7..8: mod_base = OTHER; note = 2'-O-(2-methoxyethyl) ribonucleotide
  modified_base 9: mod_base = OTHER; note = locked nucleic acid
  modified_base 10..11: mod_base = OTHER; note = 2'-O-(2-methoxyethyl) ribonucleotide
  modified_base 12: mod_base = OTHER; note = locked nucleic acid
  modified_base 13..14: mod_base = OTHER; note = 2'-O-(2-methoxyethyl) ribonucleotide
  modified_base 15: mod_base = OTHER; note = locked nucleic acid
  modified_base 16..20: mod_base = OTHER; note = 2'-O-(2-methoxyethyl) ribonucleotide
  modified_base 2: mod_base = OTHER; note = 5-methyl cytidine
  modified_base 5: mod_base = OTHER; note = 5-methyl cytidine
  modified_base 7: mod_base = OTHER; note = 5-methyl cytidine
  modified_base 17: mod_base = OTHER; note = 5-methyl cytidine
  modified_base 19..20: mod_base = OTHER; note = 5-methyl cytidine
tcagctcaaggagatgctcc

SEQ ID NO: 4879 - RNA, 20 nt, synthetic construct
  source 1..20: mol_type = other RNA
  modified_base 1..20: mod_base = OTHER; note = Phosphorothioate linkage
  modified_base 1..5: mod_base = OTHER; note = 2'-O-(2-methoxyethyl) ribonucleotide
  modified_base 6: mod_base = OTHER; note = locked nucleic acid
  modified_base 7..8: mod_base = OTHER; note = 2'-O-(2-methoxyethyl) ribonucleotide
  modified_base 9: mod_base = OTHER; note = locked nucleic acid
  modified_base 10..11: mod_base = OTHER; note = 2'-O-(2-methoxyethyl) ribonucleotide
  modified_base 12: mod_base = OTHER; note = locked nucleic acid
  modified_base 13..14: mod_base = OTHER; note = 2'-O-(2-methoxyethyl) ribonucleotide
  modified_base 15: mod_base = OTHER; note = locked nucleic acid
  modified_base 16..20: mod_base = OTHER; note = 2'-O-(2-methoxyethyl) ribonucleotide
  modified_base 1: mod_base = OTHER; note = 5-methyl cytidine
  modified_base 3..4: mod_base = OTHER; note = 5-methyl cytidine
  modified_base 6..7: mod_base = OTHER; note = 5-methyl cytidine
  modified_base 10..11: mod_base = OTHER; note = 5-methyl cytidine
ctccacctgccagttaaaat

SEQ ID NO: 4880 - RNA, 20 nt, synthetic construct
  source 1..20: mol_type = other RNA
  modified_base 1..20: mod_base = OTHER; note = Phosphorothioate linkage
  modified_base 1..5: mod_base = OTHER; note = 2'-O-(2-methoxyethyl) ribonucleotide
  modified_base 6: mod_base = OTHER; note = locked nucleic acid
  modified_base 7..8: mod_base = OTHER; note = 2'-O-(2-methoxyethyl) ribonucleotide
  modified_base 9: mod_base = OTHER; note = locked nucleic acid
  modified_base 10..11: mod_base = OTHER; note = 2'-O-(2-methoxyethyl) ribonucleotide
  modified_base 12: mod_base = OTHER; note = locked nucleic acid
  modified_base 13..14: mod_base = OTHER; note = 2'-O-(2-methoxyethyl) ribonucleotide
  modified_base 15: mod_base = OTHER; note = locked nucleic acid
  modified_base 16..20: mod_base = OTHER; note = 2'-O-(2-methoxyethyl) ribonucleotide
  modified_base 1..2: mod_base = OTHER; note = 5-methyl cytidine
  modified_base 5: mod_base = OTHER; note = 5-methyl cytidine
  modified_base 12..14: mod_base = OTHER; note = 5-methyl cytidine
  modified_base 19: mod_base = OTHER; note = 5-methyl cytidine
ccatctggtttcccagggct

SEQ ID NO: 4881 - RNA, 20 nt, synthetic construct
  source 1..20: mol_type = other RNA
  modified_base 1..20: mod_base = OTHER; note = Phosphorothioate linkage
  modified_base 1..5: mod_base = OTHER; note = 2'-O-(2-methoxyethyl) ribonucleotide
  modified_base 6: mod_base = OTHER; note = locked nucleic acid
  modified_base 7..8: mod_base = OTHER; note = 2'-O-(2-methoxyethyl) ribonucleotide
  modified_base 9: mod_base = OTHER; note = locked nucleic acid
  modified_base 10..11: mod_base = OTHER; note = 2'-O-(2-methoxyethyl) ribonucleotide
  modified_base 12: mod_base = OTHER; note = locked nucleic acid
  modified_base 13..14: mod_base = OTHER; note = 2'-O-(2-methoxyethyl) ribonucleotide
  modified_base 15: mod_base = OTHER; note = locked nucleic acid
  modified_base 16..20: mod_base = OTHER; note = 2'-O-(2-methoxyethyl) ribonucleotide
  modified_base 3: mod_base = OTHER; note = 5-methyl cytidine
  modified_base 10: mod_base = OTHER; note = 5-methyl cytidine
  modified_base 15: mod_base = OTHER; note = 5-methyl cytidine
  modified_base 19: mod_base = OTHER; note = 5-methyl cytidine
ggcattgaacatggcattca

SEQ ID NO: 4882 - RNA, 20 nt, synthetic construct
  source 1..20: mol_type = other RNA
  modified_base 1..20: mod_base = OTHER; note = Phosphorothioate linkage
  modified_base 1..5: mod_base = OTHER; note = 2'-O-(2-methoxyethyl) ribonucleotide
  modified_base 6: mod_base = OTHER; note = locked nucleic acid
  modified_base 7..8: mod_base = OTHER; note = 2'-O-(2-methoxyethyl) ribonucleotide
  modified_base 9: mod_base = OTHER; note = locked nucleic acid
  modified_base 10..11: mod_base = OTHER; note = 2'-O-(2-methoxyethyl) ribonucleotide
  modified_base 12: mod_base = OTHER; note = locked nucleic acid
  modified_base 13..14: mod_base = OTHER; note = 2'-O-(2-methoxyethyl) ribonucleotide
  modified_base 15: mod_base = OTHER; note = locked nucleic acid
  modified_base 16..20: mod_base = OTHER; note = 2'-O-(2-methoxyethyl) ribonucleotide
  modified_base 3: mod_base = OTHER; note = 5-methyl cytidine
  modified_base 5..7: mod_base = OTHER; note = 5-methyl cytidine
  modified_base 10: mod_base = OTHER; note = 5-methyl cytidine
  modified_base 13: mod_base = OTHER; note = 5-methyl cytidine
  modified_base 15..16: mod_base = OTHER; note = 5-methyl cytidine
ggcacccagcagctcctgaa

SEQ ID NO: 4883 - RNA, 20 nt, synthetic construct
  source 1..20: mol_type = other RNA
  modified_base 1..20: mod_base = OTHER; note = Phosphorothioate linkage
  modified_base 1..5: mod_base = OTHER; note = 2'-O-(2-methoxyethyl) ribonucleotide
  modified_base 6: mod_base = OTHER; note = locked nucleic acid
  modified_base 7..8: mod_base = OTHER; note = 2'-O-(2-methoxyethyl) ribonucleotide
  modified_base 9: mod_base = OTHER; note = locked nucleic acid
  modified_base 10..11: mod_base = OTHER; note = 2'-O-(2-methoxyethyl) ribonucleotide
  modified_base 12: mod_base = OTHER; note = locked nucleic acid
  modified_base 13..14: mod_base = OTHER; note = 2'-O-(2-methoxyethyl) ribonucleotide
  modified_base 15: mod_base = OTHER; note = locked nucleic acid
  modified_base 16..20: mod_base = OTHER; note = 2'-O-(2-methoxyethyl) ribonucleotide
  modified_base 1: mod_base = OTHER; note = 5-methyl cytidine
  modified_base 4: mod_base = OTHER; note = 5-methyl cytidine
  modified_base 6: mod_base = OTHER; note = 5-methyl cytidine
  modified_base 10: mod_base = OTHER; note = 5-methyl cytidine
  modified_base 13: mod_base = OTHER; note = 5-methyl cytidine
  modified_base 16..20: mod_base = OTHER; note = 5-methyl cytidine
cttctctttcgacagccccc

SEQ ID NO: 4884 - RNA, 20 nt, synthetic construct
  source 1..20: mol_type = other RNA
  modified_base 1..20: mod_base = OTHER; note = Phosphorothioate linkage
  modified_base 1..5: mod_base = OTHER; note = 2'-O-(2-methoxyethyl) ribonucleotide
  modified_base 6: mod_base = OTHER; note = locked nucleic acid
  modified_base 7..8: mod_base = OTHER; note = 2'-O-(2-methoxyethyl) ribonucleotide
  modified_base 9: mod_base = OTHER; note = locked nucleic acid
  modified_base 10..11: mod_base = OTHER; note = 2'-O-(2-methoxyethyl) ribonucleotide
  modified_base 12: mod_base = OTHER; note = locked nucleic acid
  modified_base 13..14: mod_base = OTHER; note = 2'-O-(2-methoxyethyl) ribonucleotide
  modified_base 15: mod_base = OTHER; note = locked nucleic acid
  modified_base 16..20: mod_base = OTHER; note = 2'-O-(2-methoxyethyl) ribonucleotide
  modified_base 1: mod_base = OTHER; note = 5-methyl cytidine
  modified_base 6..7: mod_base = OTHER; note = 5-methyl cytidine
  modified_base 11: mod_base = OTHER; note = 5-methyl cytidine
  modified_base 18: mod_base = OTHER; note = 5-methyl cytidine
cagggccgatctggagacta

SEQ ID NO: 4885 - RNA, 20 nt, synthetic construct
  source 1..20: mol_type = other RNA
  modified_base 1..20: mod_base = OTHER; note = Phosphorothioate linkage
  modified_base 1..5: mod_base = OTHER; note = 2'-O-(2-methoxyethyl) ribonucleotide
  modified_base 6: mod_base = OTHER; note = locked nucleic acid
  modified_base 7..8: mod_base = OTHER; note = 2'-O-(2-methoxyethyl) ribonucleotide
  modified_base 9: mod_base = OTHER; note = locked nucleic acid
  modified_base 10..11: mod_base = OTHER; note = 2'-O-(2-methoxyethyl) ribonucleotide
  modified_base 12: mod_base = OTHER; note = locked nucleic acid
  modified_base 13..14: mod_base = OTHER; note = 2'-O-(2-methoxyethyl) ribonucleotide
  modified_base 15: mod_base = OTHER; note = locked nucleic acid
  modified_base 16..20: mod_base = OTHER; note = 2'-O-(2-methoxyethyl) ribonucleotide
  modified_base 1..2: mod_base = OTHER; note = 5-methyl cytidine
  modified_base 4..6: mod_base = OTHER; note = 5-methyl cytidine
  modified_base 11: mod_base = OTHER; note = 5-methyl cytidine
  modified_base 16..17: mod_base = OTHER; note = 5-methyl cytidine
  modified_base 18: mod_base = OTHER; note = 5-methyl cytidine
cctcccatatcaattcctcg

SEQ ID NO: 4886 - RNA, 20 nt, synthetic construct
  source 1..20: mol_type = other RNA
  modified_base 1..20: mod_base = OTHER; note = Phosphorothioate linkage
  modified_base 1..5: mod_base = OTHER; note = 2'-O-(2-methoxyethyl) ribonucleotide
  modified_base 6: mod_base = OTHER; note = locked nucleic acid
  modified_base 7..8: mod_base = OTHER; note = 2'-O-(2-methoxyethyl) ribonucleotide
  modified_base 9: mod_base = OTHER; note = locked nucleic acid
  modified_base 10..11: mod_base = OTHER; note = 2'-O-(2-methoxyethyl) ribonucleotide
  modified_base 12: mod_base = OTHER; note = locked nucleic acid
  modified_base 13..14: mod_base = OTHER; note = 2'-O-(2-methoxyethyl) ribonucleotide
  modified_base 15: mod_base = OTHER; note = locked nucleic acid
  modified_base 16..20: mod_base = OTHER; note = 2'-O-(2-methoxyethyl) ribonucleotide
  modified_base 4: mod_base = OTHER; note = 5-methyl cytidine
  modified_base 6: mod_base = OTHER; note = 5-methyl cytidine
  modified_base 10: mod_base = OTHER; note = 5-methyl cytidine
  modified_base 15: mod_base = OTHER; note = 5-methyl cytidine
  modified_base 20: mod_base = OTHER; note = 5-methyl cytidine
tgtcactggctaatctgttc

SEQ ID NO: 4887 - RNA, 20 nt, synthetic construct
  source 1..20: mol_type = other RNA
  modified_base 1..20: mod_base = OTHER; note = Phosphorothioate linkage
  modified_base 1..5: mod_base = OTHER; note = 2'-O-(2-methoxyethyl) ribonucleotide
  modified_base 6: mod_base = OTHER; note = locked nucleic acid
  modified_base 7..8: mod_base = OTHER; note = 2'-O-(2-methoxyethyl) ribonucleotide
  modified_base 9: mod_base = OTHER; note = locked nucleic acid
  modified_base 10..11: mod_base = OTHER; note = 2'-O-(2-methoxyethyl) ribonucleotide
  modified_base 12: mod_base = OTHER; note = locked nucleic acid
  modified_base 13..14: mod_base = OTHER; note = 2'-O-(2-methoxyethyl) ribonucleotide
  modified_base 15: mod_base = OTHER; note = locked nucleic acid
  modified_base 16..20: mod_base = OTHER; note = 2'-O-(2-methoxyethyl) ribonucleotide
  modified_base 6: mod_base = OTHER; note = 5-methyl cytidine
  modified_base 8..9: mod_base = OTHER; note = 5-methyl cytidine
  modified_base 13: mod_base = OTHER; note = 5-methyl cytidine
  modified_base 17: mod_base = OTHER; note = 5-methyl cytidine
tttggcaccaagcaggctga

SEQ ID NO: 4888 - RNA, 20 nt, synthetic construct
  source 1..20: mol_type = other RNA
  modified_base 1..20: mod_base = OTHER; note = Phosphorothioate linkage
  modified_base 1..5: mod_base = OTHER; note = 2'-O-(2-methoxyethyl) ribonucleotide
  modified_base 6: mod_base = OTHER; note = locked nucleic acid
  modified_base 7..8: mod_base = OTHER; note = 2'-O-(2-methoxyethyl) ribonucleotide
  modified_base 9: mod_base = OTHER; note = locked nucleic acid
  modified_base 10..11: mod_base = OTHER; note = 2'-O-(2-methoxyethyl) ribonucleotide
  modified_base 12: mod_base = OTHER; note = locked nucleic acid
  modified_base 13..14: mod_base = OTHER; note = 2'-O-(2-methoxyethyl) ribonucleotide
  modified_base 15: mod_base = OTHER; note = locked nucleic acid
  modified_base 16..20: mod_base = OTHER; note = 2'-O-(2-methoxyethyl) ribonucleotide
  modified_base 2: mod_base = OTHER; note = 5-methyl cytidine
  modified_base 5..7: mod_base = OTHER; note = 5-methyl cytidine
  modified_base 13: mod_base = OTHER; note = 5-methyl cytidine
  modified_base 17: mod_base = OTHER; note = 5-methyl cytidine
acggcccagtatcaggcttt

SEQ ID NO: 4889 - RNA, 20 nt, synthetic construct
  source 1..20: mol_type = other RNA
  modified_base 1..20: mod_base = OTHER; note = Phosphorothioate linkage
  modified_base 1..5: mod_base = OTHER; note = 2'-O-(2-methoxyethyl) ribonucleotide
  modified_base 6: mod_base = OTHER; note = locked nucleic acid
  modified_base 7..8: mod_base = OTHER; note = 2'-O-(2-methoxyethyl) ribonucleotide
  modified_base 9: mod_base = OTHER; note = locked nucleic acid
  modified_base 10..11: mod_base = OTHER; note = 2'-O-(2-methoxyethyl) ribonucleotide
  modified_base 12: mod_base = OTHER; note = locked nucleic acid
  modified_base 13..14: mod_base = OTHER; note = 2'-O-(2-methoxyethyl) ribonucleotide
  modified_base 15: mod_base = OTHER; note = locked nucleic acid
  modified_base 16..20: mod_base = OTHER; note = 2'-O-(2-methoxyethyl) ribonucleotide
  modified_base 1..2: mod_base = OTHER; note = 5-methyl cytidine
  modified_base 4: mod_base = OTHER; note = 5-methyl cytidine
  modified_base 7..8: mod_base = OTHER; note = 5-methyl cytidine
  modified_base 10: mod_base = OTHER; note = 5-methyl cytidine
  modified_base 13: mod_base = OTHER; note = 5-methyl cytidine
  modified_base 15..16: mod_base = OTHER; note = 5-methyl cytidine
cctcatcctcagctccagtt

SEQ ID NO: 4890 - RNA, 20 nt, synthetic construct
  source 1..20: mol_type = other RNA
  modified_base 1..20: mod_base = OTHER; note = Phosphorothioate linkage
  modified_base 1..5: mod_base = OTHER; note = 2'-O-(2-methoxyethyl) ribonucleotide
  modified_base 6: mod_base = OTHER; note = locked nucleic acid
  modified_base 7..8: mod_base = OTHER; note = 2'-O-(2-methoxyethyl) ribonucleotide
  modified_base 9: mod_base = OTHER; note = locked nucleic acid
  modified_base 10..11: mod_base = OTHER; note = 2'-O-(2-methoxyethyl) ribonucleotide
  modified_base 12: mod_base = OTHER; note = locked nucleic acid
  modified_base 13..14: mod_base = OTHER; note = 2'-O-(2-methoxyethyl) ribonucleotide
  modified_base 15: mod_base = OTHER; note = locked nucleic acid
  modified_base 16..20: mod_base = OTHER; note = 2'-O-(2-methoxyethyl) ribonucleotide
  modified_base 1: mod_base = OTHER; note = 5-methyl cytidine
  modified_base 5: mod_base = OTHER; note = 5-methyl cytidine
  modified_base 14..15: mod_base = OTHER; note = 5-methyl cytidine
  modified_base 18..20: mod_base = OTHER; note = 5-methyl cytidine
cgagcttggttagccatccc

SEQ ID NO: 4891 - RNA, 20 nt, synthetic construct
  source 1..20: mol_type = other RNA
  modified_base 1..20: mod_base = OTHER; note = Phosphorothioate linkage
  modified_base 1..5: mod_base = OTHER; note = 2'-O-(2-methoxyethyl) ribonucleotide
  modified_base 6: mod_base = OTHER; note = locked nucleic acid
  modified_base 7..8: mod_base = OTHER; note = 2'-O-(2-methoxyethyl) ribonucleotide
  modified_base 9: mod_base = OTHER; note = locked nucleic acid
  modified_base 10..11: mod_base = OTHER; note = 2'-O-(2-methoxyethyl) ribonucleotide
  modified_base 12: mod_base = OTHER; note = locked nucleic acid
  modified_base 13..14: mod_base = OTHER; note = 2'-O-(2-methoxyethyl) ribonucleotide
  modified_base 15: mod_base = OTHER; note = locked nucleic acid
  modified_base 16..20: mod_base = OTHER; note = 2'-O-(2-methoxyethyl) ribonucleotide
  modified_base 2..4: mod_base = OTHER; note = 5-methyl cytidine
  modified_base 6..7: mod_base = OTHER; note = 5-methyl cytidine
  modified_base 9..10: mod_base = OTHER; note = 5-methyl cytidine
  modified_base 13: mod_base = OTHER; note = 5-methyl cytidine
  modified_base 16: mod_base = OTHER; note = 5-methyl cytidine
  modified_base 19: mod_base = OTHER; note = 5-methyl cytidine
tccctcctccgacttctgct

SEQ ID NO: 4892 - RNA, 20 nt, synthetic construct
  source 1..20: mol_type = other RNA
  modified_base 1..20: mod_base = OTHER; note = Phosphorothioate linkage
  modified_base 1..5: mod_base = OTHER; note = 2'-O-(2-methoxyethyl) ribonucleotide
  modified_base 6: mod_base = OTHER; note = locked nucleic acid
  modified_base 7..8: mod_base = OTHER; note = 2'-O-(2-methoxyethyl) ribonucleotide
  modified_base 9: mod_base = OTHER; note = locked nucleic acid
  modified_base 10..11: mod_base = OTHER; note = 2'-O-(2-methoxyethyl) ribonucleotide
  modified_base 12: mod_base = OTHER; note = locked nucleic acid
  modified_base 13..14: mod_base = OTHER; note = 2'-O-(2-methoxyethyl) ribonucleotide
  modified_base 15: mod_base = OTHER; note = locked nucleic acid
  modified_base 16..20: mod_base = OTHER; note = 2'-O-(2-methoxyethyl) ribonucleotide
  modified_base 2: mod_base = OTHER; note = 5-methyl cytidine
  modified_base 5: mod_base = OTHER; note = 5-methyl cytidine
  modified_base 7..8: mod_base = OTHER; note = 5-methyl cytidine
  modified_base 10: mod_base = OTHER; note = 5-methyl cytidine
  modified_base 13: mod_base = OTHER; note = 5-methyl cytidine
  modified_base 15: mod_base = OTHER; note = 5-methyl cytidine
acgactccacagctcggttg

SEQ ID NO: 4893 - RNA, 20 nt, synthetic construct
  source 1..20: mol_type = other RNA
  modified_base 1..20: mod_base = OTHER; note = Phosphorothioate linkage
  modified_base 1..5: mod_base = OTHER; note = 2'-O-(2-methoxyethyl) ribonucleotide
  modified_base 6: mod_base = OTHER; note = locked nucleic acid
  modified_base 7..8: mod_base = OTHER; note = 2'-O-(2-methoxyethyl) ribonucleotide
  modified_base 9: mod_base = OTHER; note = locked nucleic acid
  modified_base 10..11: mod_base = OTHER; note = 2'-O-(2-methoxyethyl) ribonucleotide
  modified_base 12: mod_base = OTHER; note = locked nucleic acid
  modified_base 13..14: mod_base = OTHER; note = 2'-O-(2-methoxyethyl) ribonucleotide
  modified_base 15: mod_base = OTHER; note = locked nucleic acid
  modified_base 16..20: mod_base = OTHER; note = 2'-O-(2-methoxyethyl) ribonucleotide
  modified_base 2: mod_base = OTHER; note = 5-methyl cytidine
  modified_base 4: mod_base = OTHER; note = 5-methyl cytidine
  modified_base 8: mod_base = OTHER; note = 5-methyl cytidine
  modified_base 10..11: mod_base = OTHER; note = 5-methyl cytidine
  modified_base 15: mod_base = OTHER; note = 5-methyl cytidine
gctctagctccaggcttaga

SEQ ID NO: 4894 - RNA, 20 nt, synthetic construct
  source 1..20: mol_type = other RNA
  modified_base 1..20: mod_base = OTHER; note = Phosphorothioate linkage
  modified_base 1..5: mod_base = OTHER; note = 2'-O-(2-methoxyethyl) ribonucleotide
  modified_base 6: mod_base = OTHER; note = locked nucleic acid
  modified_base 7..8: mod_base = OTHER; note = 2'-O-(2-methoxyethyl) ribonucleotide
  modified_base 9: mod_base = OTHER; note = locked nucleic acid
  modified_base 10..11: mod_base = OTHER; note = 2'-O-(2-methoxyethyl) ribonucleotide
  modified_base 12: mod_base = OTHER; note = locked nucleic acid
  modified_base 13..14: mod_base = OTHER; note = 2'-O-(2-methoxyethyl) ribonucleotide
  modified_base 15: mod_base = OTHER; note = locked nucleic acid
  modified_base 16..20: mod_base = OTHER; note = 2'-O-(2-methoxyethyl) ribonucleotide
  modified_base 2..3: mod_base = OTHER; note = 5-methyl cytidine
  modified_base 10: mod_base = OTHER; note = 5-methyl cytidine
  modified_base 15..16: mod_base = OTHER; note = 5-methyl cytidine
  modified_base 18: mod_base = OTHER; note = 5-methyl cytidine
gccaggtgtcttatccgctg

SEQ ID NO: 4895 - RNA, 20 nt, synthetic construct
  source 1..20: mol_type = other RNA
  modified_base 1..20: mod_base = OTHER; note = Phosphorothioate linkage
  modified_base 1..5: mod_base = OTHER; note = 2'-O-(2-methoxyethyl) ribonucleotide
  modified_base 6: mod_base = OTHER; note = locked nucleic acid
  modified_base 7..8: mod_base = OTHER; note = 2'-O-(2-methoxyethyl) ribonucleotide
  modified_base 9: mod_base = OTHER; note = locked nucleic acid
  modified_base 10..11: mod_base = OTHER; note = 2'-O-(2-methoxyethyl) ribonucleotide
  modified_base 12: mod_base = OTHER; note = locked nucleic acid
  modified_base 13..14: mod_base = OTHER; note = 2'-O-(2-methoxyethyl) ribonucleotide
  modified_base 15: mod_base = OTHER; note = locked nucleic acid
  modified_base 16..20: mod_base = OTHER; note = 2'-O-(2-methoxyethyl) ribonucleotide
  modified_base 2: mod_base = OTHER; note = 5-methyl cytidine
  modified_base 4..5: mod_base = OTHER; note = 5-methyl cytidine
  modified_base 10: mod_base = OTHER; note = 5-methyl cytidine
  modified_base 12: mod_base = OTHER; note = 5-methyl cytidine
  modified_base 16: mod_base = OTHER; note = 5-methyl cytidine
tcaccagggcacagactagt

SEQ ID NO: 4896 - RNA, 20 nt, synthetic construct
  source 1..20: mol_type = other RNA
  modified_base 1..20: mod_base = OTHER; note = Phosphorothioate linkage
  modified_base 1..5: mod_base = OTHER; note = 2'-O-(2-methoxyethyl) ribonucleotide
  modified_base 6: mod_base = OTHER; note = locked nucleic acid
  modified_base 7..8: mod_base = OTHER; note = 2'-O-(2-methoxyethyl) ribonucleotide
  modified_base 9: mod_base = OTHER; note = locked nucleic acid
  modified_base 10..11: mod_base = OTHER; note = 2'-O-(2-methoxyethyl) ribonucleotide
  modified_base 12: mod_base = OTHER; note = locked nucleic acid
  modified_base 13..14: mod_base = OTHER; note = 2'-O-(2-methoxyethyl) ribonucleotide
  modified_base 15: mod_base = OTHER; note = locked nucleic acid
  modified_base 16..20: mod_base = OTHER; note = 2'-O-(2-methoxyethyl) ribonucleotide
  modified_base 2: mod_base = OTHER; note = 5-methyl cytidine
  modified_base 18: mod_base = OTHER; note = 5-methyl cytidine
  modified_base 20: mod_base = OTHER; note = 5-methyl cytidine
acaggaaggaaaataagcac

SEQ ID NO: 4897 - RNA, 20 nt, synthetic construct
  source 1..20: mol_type = other RNA
  modified_base 1..20: mod_base = OTHER; note = Phosphorothioate linkage
  modified_base 1..5: mod_base = OTHER; note = 2'-O-(2-methoxyethyl) ribonucleotide
  modified_base 6: mod_base = OTHER; note = locked nucleic acid
  modified_base 7..8: mod_base = OTHER; note = 2'-O-(2-methoxyethyl) ribonucleotide
  modified_base 9: mod_base = OTHER; note = locked nucleic acid
  modified_base 10..11: mod_base = OTHER; note = 2'-O-(2-methoxyethyl) ribonucleotide
  modified_base 12: mod_base = OTHER; note = locked nucleic acid
  modified_base 13..14: mod_base = OTHER; note = 2'-O-(2-methoxyethyl) ribonucleotide
  modified_base 15: mod_base = OTHER; note = locked nucleic acid
  modified_base 16..20: mod_base = OTHER; note = 2'-O-(2-methoxyethyl) ribonucleotide
  modified_base 2: mod_base = OTHER; note = 5-methyl cytidine
  modified_base 7: mod_base = OTHER; note = 5-methyl cytidine
  modified_base 9..11: mod_base = OTHER; note = 5-methyl cytidine
  modified_base 16: mod_base = OTHER; note = 5-methyl cytidine
  modified_base 18: mod_base = OTHER; note = 5-methyl cytidine
actatactccctagtctcaa

SEQ ID NO: 4898 - RNA, 20 nt, synthetic construct
  source 1..20: mol_type = other RNA
  modified_base 1..20: mod_base = OTHER; note = Phosphorothioate linkage
  modified_base 1..5: mod_base = OTHER; note = 2'-O-(2-methoxyethyl) ribonucleotide
  modified_base 6: mod_base = OTHER; note = locked nucleic acid
  modified_base 7..8: mod_base = OTHER; note = 2'-O-(2-methoxyethyl) ribonucleotide
  modified_base 9: mod_base = OTHER; note = locked nucleic acid
  modified_base 10..11: mod_base = OTHER; note = 2'-O-(2-methoxyethyl) ribonucleotide
  modified_base 12: mod_base = OTHER; note = locked nucleic acid
  modified_base 13..14: mod_base = OTHER; note = 2'-O-(2-methoxyethyl) ribonucleotide
  modified_base 15: mod_base = OTHER; note = locked nucleic acid
  modified_base 16..20: mod_base = OTHER; note = 2'-O-(2-methoxyethyl) ribonucleotide
  modified_base 11: mod_base = OTHER; note = 5-methyl cytidine
  modified_base 20: mod_base = OTHER; note = 5-methyl cytidine
gtgtgtgtttcaatagaagc

SEQ ID NO: 4899 - RNA, 20 nt, synthetic construct
  source 1..20: mol_type = other RNA
  modified_base 1..20: mod_base = OTHER; note = Phosphorothioate linkage
  modified_base 1..5: mod_base = OTHER; note = 2'-O-(2-methoxyethyl) ribonucleotide
  modified_base 6: mod_base = OTHER; note = locked nucleic acid
  modified_base 7..8: mod_base = OTHER; note = 2'-O-(2-methoxyethyl) ribonucleotide
  modified_base 9: mod_base = OTHER; note = locked nucleic acid
  modified_base 10..11: mod_base = OTHER; note = 2'-O-(2-methoxyethyl) ribonucleotide
  modified_base 12: mod_base = OTHER; note = locked nucleic acid
  modified_base 13..14: mod_base = OTHER; note = 2'-O-(2-methoxyethyl) ribonucleotide
  modified_base 15: mod_base = OTHER; note = locked nucleic acid
  modified_base 16..20: mod_base = OTHER; note = 2'-O-(2-methoxyethyl) ribonucleotide
  modified_base 5: mod_base = OTHER; note = 5-methyl cytidine
  modified_base 10: mod_base = OTHER; note = 5-methyl cytidine
  modified_base 12..13: mod_base = OTHER; note = 5-methyl cytidine
  modified_base 17: mod_base = OTHER; note = 5-methyl cytidine
tgatcgattcacctaacatt

SEQ ID NO: 4900 - RNA, 20 nt, synthetic construct
  source 1..20: mol_type = other RNA
  modified_base 1..20: mod_base = OTHER; note = Phosphorothioate linkage
  modified_base 1..5: mod_base = OTHER; note = 2'-O-(2-methoxyethyl) ribonucleotide
  modified_base 6: mod_base = OTHER; note = locked nucleic acid
  modified_base 7..8: mod_base = OTHER; note = 2'-O-(2-methoxyethyl) ribonucleotide
  modified_base 9: mod_base = OTHER; note = locked nucleic acid
  modified_base 10..11: mod_base = OTHER; note = 2'-O-(2-methoxyethyl) ribonucleotide
  modified_base 12: mod_base = OTHER; note = locked nucleic acid
  modified_base 13..14: mod_base = OTHER; note = 2'-O-(2-methoxyethyl) ribonucleotide
  modified_base 15: mod_base = OTHER; note = locked nucleic acid
  modified_base 16..20: mod_base = OTHER; note = 2'-O-(2-methoxyethyl) ribonucleotide
  modified_base 6: mod_base = OTHER; note = 5-methyl cytidine
  modified_base 12: mod_base = OTHER; note = 5-methyl cytidine
tttttctggttctgggtggt

SEQ ID NO: 4901 - RNA, 20 nt, synthetic construct
  source 1..20: mol_type = other RNA
  modified_base 1..20: mod_base = OTHER; note = Phosphorothioate linkage
  modified_base 1..5: mod_base = OTHER; note = 2'-O-(2-methoxyethyl) ribonucleotide
  modified_base 6: mod_base = OTHER; note = locked nucleic acid
  modified_base 7..8: mod_base = OTHER; note = 2'-O-(2-methoxyethyl) ribonucleotide
  modified_base 9: mod_base = OTHER; note = locked nucleic acid
  modified_base 10..11: mod_base = OTHER; note = 2'-O-(2-methoxyethyl) ribonucleotide
  modified_base 12: mod_base = OTHER; note = locked nucleic acid
  modified_base 13..14: mod_base = OTHER; note = 2'-O-(2-methoxyethyl) ribonucleotide
  modified_base 15: mod_base = OTHER; note = locked nucleic acid
  modified_base 16..20: mod_base = OTHER; note = 2'-O-(2-methoxyethyl) ribonucleotide
  modified_base 7: mod_base = OTHER; note = 5-methyl cytidine
  modified_base 11: mod_base = OTHER; note = 5-methyl cytidine
ttgtttcagtctgtttaggt

SEQ ID NO: 4902 - RNA, 20 nt, synthetic construct
  source 1..20: mol_type = other RNA
  modified_base 1..20: mod_base = OTHER; note = Phosphorothioate linkage
  modified_base 1..5: mod_base = OTHER; note = 2'-O-(2-methoxyethyl) ribonucleotide
  modified_base 6: mod_base = OTHER; note = locked nucleic acid
  modified_base 7..8: mod_base = OTHER; note = 2'-O-(2-methoxyethyl) ribonucleotide
  modified_base 9: mod_base = OTHER; note = locked nucleic acid
  modified_base 10..11: mod_base = OTHER; note = 2'-O-(2-methoxyethyl) ribonucleotide
  modified_base 12: mod_base = OTHER; note = locked nucleic acid
  modified_base 13..14: mod_base = OTHER; note = 2'-O-(2-methoxyethyl) ribonucleotide
  modified_base 15: mod_base = OTHER; note = locked nucleic acid
  modified_base 16..20: mod_base = OTHER; note = 2'-O-(2-methoxyethyl) ribonucleotide
  modified_base 5: mod_base = OTHER; note = 5-methyl cytidine
  modified_base 7: mod_base = OTHER; note = 5-methyl cytidine
  modified_base 10: mod_base = OTHER; note = 5-methyl cytidine
  modified_base 16: mod_base = OTHER; note = 5-methyl cytidine
gaatcacggctttgacgatt

SEQ ID NO: 4903 - RNA, 20 nt, synthetic construct
  source 1..20: mol_type = other RNA
  modified_base 1..20: mod_base = OTHER; note = Phosphorothioate linkage
  modified_base 1..5: mod_base = OTHER; note = 2'-O-(2-methoxyethyl) ribonucleotide
  modified_base 6: mod_base = OTHER; note = locked nucleic acid
  modified_base 7..8: mod_base = OTHER; note = 2'-O-(2-methoxyethyl) ribonucleotide
  modified_base 9: mod_base = OTHER; note = locked nucleic acid
  modified_base 10..11: mod_base = OTHER; note = 2'-O-(2-methoxyethyl) ribonucleotide
  modified_base 12: mod_base = OTHER; note = locked nucleic acid
  modified_base 13..14: mod_base = OTHER; note = 2'-O-(2-methoxyethyl) ribonucleotide
  modified_base 15: mod_base = OTHER; note = locked nucleic acid
  modified_base 16..20: mod_base = OTHER; note = 2'-O-(2-methoxyethyl) ribonucleotide
  modified_base 3..5: mod_base = OTHER; note = 5-methyl cytidine
  modified_base 9..10: mod_base = OTHER; note = 5-methyl cytidine
  modified_base 13: mod_base = OTHER; note = 5-methyl cytidine
gtccctggccggcaaaattg

SEQ ID NO: 4904 - RNA, 20 nt, synthetic construct
  source 1..20: mol_type = other RNA
  modified_base 1..20: mod_base = OTHER; note = Phosphorothioate linkage
  modified_base 1..5: mod_base = OTHER; note = 2'-O-(2-methoxyethyl) ribonucleotide
  modified_base 6: mod_base = OTHER; note = locked nucleic acid
  modified_base 7..8: mod_base = OTHER; note = 2'-O-(2-methoxyethyl) ribonucleotide
  modified_base 9: mod_base = OTHER; note = locked nucleic acid
  modified_base 10..11: mod_base = OTHER; note = 2'-O-(2-methoxyethyl) ribonucleotide
  modified_base 12: mod_base = OTHER; note = locked nucleic acid
  modified_base 13..14: mod_base = OTHER; note = 2'-O-(2-methoxyethyl) ribonucleotide
  modified_base 15: mod_base = OTHER; note = locked nucleic acid
  modified_base 16..20: mod_base = OTHER; note = 2'-O-(2-methoxyethyl) ribonucleotide
  modified_base 7: mod_base = OTHER; note = 5-methyl cytidine
  modified_base 9..10: mod_base = OTHER; note = 5-methyl cytidine
  modified_base 14: mod_base = OTHER; note = 5-methyl cytidine
  modified_base 16: mod_base = OTHER; note = 5-methyl cytidine
  modified_base 18..19: mod_base = OTHER; note = 5-methyl cytidine
gattgtctccagacactcct

SEQ ID NO: 4905 - RNA, 20 nt, synthetic construct
  source 1..20: mol_type = other RNA
  modified_base 1..20: mod_base = OTHER; note = Phosphorothioate linkage
  modified_base 1..5: mod_base = OTHER; note = 2'-O-(2-methoxyethyl) ribonucleotide
  modified_base 6: mod_base = OTHER; note = locked nucleic acid
  modified_base 7..8: mod_base = OTHER; note = 2'-O-(2-methoxyethyl) ribonucleotide
  modified_base 9: mod_base = OTHER; note = locked nucleic acid
  modified_base 10..11: mod_base = OTHER; note = 2'-O-(2-methoxyethyl) ribonucleotide
  modified_base 12: mod_base = OTHER; note = locked nucleic acid
  modified_base 13..14: mod_base = OTHER; note = 2'-O-(2-methoxyethyl) ribonucleotide
  modified_base 15: mod_base = OTHER; note = locked nucleic acid
  modified_base 16..20: mod_base = OTHER; note = 2'-O-(2-methoxyethyl) ribonucleotide
  modified_base 2..3: mod_base = OTHER; note = 5-methyl cytidine
  modified_base 9..10: mod_base = OTHER; note = 5-methyl cytidine
  modified_base 16..18: mod_base = OTHER; note = 5-methyl cytidine
  modified_base 20: mod_base = OTHER; note = 5-methyl cytidine
accagatgccagtgtccctc

SEQ ID NO: 4906 - RNA, 20 nt, synthetic construct
  source 1..20: mol_type = other RNA
  modified_base 1..20: mod_base = OTHER; note = Phosphorothioate linkage
  modified_base 1..5: mod_base = OTHER; note = 2'-O-(2-methoxyethyl) ribonucleotide
  modified_base 6: mod_base = OTHER; note = locked nucleic acid
  modified_base 7..8: mod_base = OTHER; note = 2'-O-(2-methoxyethyl) ribonucleotide
  modified_base 9: mod_base = OTHER; note = locked nucleic acid
  modified_base 10..11: mod_base = OTHER; note = 2'-O-(2-methoxyethyl) ribonucleotide
  modified_base 12: mod_base = OTHER; note = locked nucleic acid
  modified_base 13..14: mod_base = OTHER; note = 2'-O-(2-methoxyethyl) ribonucleotide
  modified_base 15: mod_base = OTHER; note = locked nucleic acid
  modified_base 16..20: mod_base = OTHER; note = 2'-O-(2-methoxyethyl) ribonucleotide
  modified_base 20: mod_base = OTHER; note = 5-methyl cytidine
gtgatgtttagtgggattgc

SEQ ID NO: 4907 - RNA, 20 nt, synthetic construct
  source 1..20: mol_type = other RNA
  modified_base 1..20: mod_base = OTHER; note = Phosphorothioate linkage
  modified_base 1..5: mod_base = OTHER; note = 2'-O-(2-methoxyethyl) ribonucleotide
  modified_base 6: mod_base = OTHER; note = locked nucleic acid
  modified_base 7..8: mod_base = OTHER; note = 2'-O-(2-methoxyethyl) ribonucleotide
  modified_base 9: mod_base = OTHER; note = locked nucleic acid
  modified_base 10..11: mod_base = OTHER; note = 2'-O-(2-methoxyethyl) ribonucleotide
  modified_base 12: mod_base = OTHER; note = locked nucleic acid
  modified_base 13..14: mod_base = OTHER; note = 2'-O-(2-methoxyethyl) ribonucleotide
  modified_base 15: mod_base = OTHER; note = locked nucleic acid
  modified_base 16..20: mod_base = OTHER; note = 2'-O-(2-methoxyethyl) ribonucleotide
  modified_base 14: mod_base = OTHER; note = 5-methyl cytidine
gtgggggattgttctgtgtg

SEQ ID NO: 4908 - RNA, 20 nt, synthetic construct
  source 1..20: mol_type = other RNA
  modified_base 1..20: mod_base = OTHER; note = Phosphorothioate linkage
  modified_base 1..5: mod_base = OTHER; note = 2'-O-(2-methoxyethyl) ribonucleotide
  modified_base 6: mod_base = OTHER; note = locked nucleic acid
  modified_base 7..8: mod_base = OTHER; note = 2'-O-(2-methoxyethyl) ribonucleotide
  modified_base 9: mod_base = OTHER; note = locked nucleic acid
  modified_base 10..11: mod_base = OTHER; note = 2'-O-(2-methoxyethyl) ribonucleotide
  modified_base 12: mod_base = OTHER; note = locked nucleic acid
  modified_base 13..14: mod_base = OTHER; note = 2'-O-(2-methoxyethyl) ribonucleotide
  modified_base 15: mod_base = OTHER; note = locked nucleic acid
  modified_base 16..20: mod_base = OTHER; note = 2'-O-(2-methoxyethyl) ribonucleotide
  modified_base 3..4: mod_base = OTHER; note = 5-methyl cytidine
  modified_base 12: mod_base = OTHER; note = 5-methyl cytidine
  modified_base 19: mod_base = OTHER; note = 5-methyl cytidine
gaccttttgggcaggatact

SEQ ID NO: 4909 - RNA, 20 nt, synthetic construct
  source 1..20: mol_type = other RNA
  modified_base 1..20: mod_base = OTHER; note = Phosphorothioate linkage
  modified_base 1..5: mod_base = OTHER; note = 2'-O-(2-methoxyethyl) ribonucleotide
  modified_base 6: mod_base = OTHER; note = locked nucleic acid
  modified_base 7..8: mod_base = OTHER; note = 2'-O-(2-methoxyethyl) ribonucleotide
  modified_base 9: mod_base = OTHER; note = locked nucleic acid
  modified_base 10..11: mod_base = OTHER; note = 2'-O-(2-methoxyethyl) ribonucleotide
  modified_base 12: mod_base = OTHER; note = locked nucleic acid
  modified_base 13..14: mod_base = OTHER; note = 2'-O-(2-methoxyethyl) ribonucleotide
  modified_base 15: mod_base = OTHER; note = locked nucleic acid
  modified_base 16..20: mod_base = OTHER; note = 2'-O-(2-methoxyethyl) ribonucleotide
  modified_base 16: mod_base = OTHER; note = 5-methyl cytidine
  modified_base 18: mod_base = OTHER; note = 5-methyl cytidine
agtaggttgttgagtctcag

SEQ ID NO: 4910 - RNA, 20 nt, synthetic construct
  source 1..20: mol_type = other RNA
  modified_base 1..20: mod_base = OTHER; note = Phosphorothioate linkage
  modified_base 1..5: mod_base = OTHER; note = 2'-O-(2-methoxyethyl) ribonucleotide
  modified_base 6: mod_base = OTHER; note = locked nucleic acid
  modified_base 7..8: mod_base = OTHER; note = 2'-O-(2-methoxyethyl) ribonucleotide
  modified_base 9: mod_base = OTHER; note = locked nucleic acid
  modified_base 10..11: mod_base = OTHER; note = 2'-O-(2-methoxyethyl) ribonucleotide
  modified_base 12: mod_base = OTHER; note = locked nucleic acid
  modified_base 13..14: mod_base = OTHER; note = 2'-O-(2-methoxyethyl) ribonucleotide
  modified_base 15: mod_base = OTHER; note = locked nucleic acid
  modified_base 16..20: mod_base = OTHER; note = 2'-O-(2-methoxyethyl) ribonucleotide
  modified_base 3: mod_base = OTHER; note = 5-methyl cytidine
  modified_base 8: mod_base = OTHER; note = 5-methyl cytidine
  modified_base 10..11: mod_base = OTHER; note = 5-methyl cytidine
  modified_base 15..17: mod_base = OTHER; note = 5-methyl cytidine
  modified_base 20: mod_base = OTHER; note = 5-methyl cytidine
atcgtggcaccttacccttc

SEQ ID NO: 4911 - RNA, 20 nt, synthetic construct
  source 1..20: mol_type = other RNA
  modified_base 1..20: mod_base = OTHER; note = Phosphorothioate linkage
  modified_base 1..5: mod_base = OTHER; note = 2'-O-(2-methoxyethyl) ribonucleotide
  modified_base 6: mod_base = OTHER; note = locked nucleic acid
  modified_base 7..8: mod_base = OTHER; note = 2'-O-(2-methoxyethyl) ribonucleotide
  modified_base 9: mod_base = OTHER; note = locked nucleic acid
  modified_base 10..11: mod_base = OTHER; note = 2'-O-(2-methoxyethyl) ribonucleotide
  modified_base 12: mod_base = OTHER; note = locked nucleic acid
  modified_base 13..14: mod_base = OTHER; note = 2'-O-(2-methoxyethyl) ribonucleotide
  modified_base 15: mod_base = OTHER; note = locked nucleic acid
  modified_base 16..20: mod_base = OTHER; note = 2'-O-(2-methoxyethyl) ribonucleotide
  modified_base 14: mod_base = OTHER; note = 5-methyl cytidine
  modified_base 18..19: mod_base = OTHER; note = 5-methyl cytidine
gagtagggaattacagacct

SEQ ID NO: 4912 - RNA, 20 nt, synthetic construct
  source 1..20: mol_type = other RNA
  modified_base 1..20: mod_base = OTHER; note = Phosphorothioate linkage
  modified_base 1..5: mod_base = OTHER; note = 2'-O-(2-methoxyethyl) ribonucleotide
  modified_base 6: mod_base = OTHER; note = locked nucleic acid
  modified_base 7..8: mod_base = OTHER; note = 2'-O-(2-methoxyethyl) ribonucleotide
  modified_base 9: mod_base = OTHER; note = locked nucleic acid
  modified_base 10..11: mod_base = OTHER; note = 2'-O-(2-methoxyethyl) ribonucleotide
  modified_base 12: mod_base = OTHER; note = locked nucleic acid
  modified_base 13..14: mod_base = OTHER; note = 2'-O-(2-methoxyethyl) ribonucleotide
  modified_base 15: mod_base = OTHER; note = locked nucleic acid
  modified_base 16..20: mod_base = OTHER; note = 2'-O-(2-methoxyethyl) ribonucleotide
  modified_base 10: mod_base = OTHER; note = 5-methyl cytidine
ttgtgttggcgggggtggat

SEQ ID NO: 4913 - RNA, 20 nt, synthetic construct
  source 1..20: mol_type = other RNA
  modified_base 1..20: mod_base = OTHER; note = Phosphorothioate linkage
  modified_base 1..5: mod_base = OTHER; note = 2'-O-(2-methoxyethyl) ribonucleotide
  modified_base 6: mod_base = OTHER; note = locked nucleic acid
  modified_base 7..8: mod_base = OTHER; note = 2'-O-(2-methoxyethyl) ribonucleotide
  modified_base 9: mod_base = OTHER; note = locked nucleic acid
  modified_base 10..11: mod_base = OTHER; note = 2'-O-(2-methoxyethyl) ribonucleotide
  modified_base 12: mod_base = OTHER; note = locked nucleic acid
  modified_base 13..14: mod_base = OTHER; note = 2'-O-(2-methoxyethyl) ribonucleotide
  modified_base 15: mod_base = OTHER; note = locked nucleic acid
  modified_base 16..20: mod_base = OTHER; note = 2'-O-(2-methoxyethyl) ribonucleotide
  modified_base 2: mod_base = OTHER; note = 5-methyl cytidine
  modified_base 7: mod_base = OTHER; note = 5-methyl cytidine
  modified_base 9: mod_base = OTHER; note = 5-methyl cytidine
  modified_base 11: mod_base = OTHER; note = 5-methyl cytidine
  modified_base 18: mod_base = OTHER; note = 5-methyl cytidine
  modified_base 20: mod_base = OTHER; note = 5-methyl cytidine
gcataactctcttaagacac

SEQ ID NO: 4914 - RNA, 20 nt, synthetic construct
  source 1..20: mol_type = other RNA
  modified_base 1..20: mod_base = OTHER; note = Phosphorothioate linkage
  modified_base 1..5: mod_base = OTHER; note = 2'-O-(2-methoxyethyl) ribonucleotide
  modified_base 6: mod_base = OTHER; note = locked nucleic acid
  modified_base 7..8: mod_base = OTHER; note = 2'-O-(2-methoxyethyl) ribonucleotide
  modified_base 9: mod_base = OTHER; note = locked nucleic acid
  modified_base 10..11: mod_base = OTHER; note = 2'-O-(2-methoxyethyl) ribonucleotide
  modified_base 12: mod_base = OTHER; note = locked nucleic acid
  modified_base 13..14: mod_base = OTHER; note = 2'-O-(2-methoxyethyl) ribonucleotide
  modified_base 15: mod_base = OTHER; note = locked nucleic acid
  modified_base 16..20: mod_base = OTHER; note = 2'-O-(2-methoxyethyl) ribonucleotide
  modified_base 3: mod_base = OTHER; note = 5-methyl cytidine
  modified_base 6..7: mod_base = OTHER; note = 5-methyl cytidine
  modified_base 10: mod_base = OTHER; note = 5-methyl cytidine
ggctgccttctgtggtgata

SEQ ID NO: 4915 - RNA, 20 nt, synthetic construct
  source 1..20: mol_type = other RNA
  modified_base 1..20: mod_base = OTHER; note = Phosphorothioate linkage
  modified_base 1..5: mod_base = OTHER; note = 2'-O-(2-methoxyethyl) ribonucleotide
  modified_base 6: mod_base = OTHER; note = locked nucleic acid
  modified_base 7..8: mod_base = OTHER; note = 2'-O-(2-methoxyethyl) ribonucleotide
  modified_base 9: mod_base = OTHER; note = locked nucleic acid
  modified_base 10..11: mod_base = OTHER; note = 2'-O-(2-methoxyethyl) ribonucleotide
  modified_base 12: mod_base = OTHER; note = locked nucleic acid
  modified_base 13..14: mod_base = OTHER; note = 2'-O-(2-methoxyethyl) ribonucleotide
  modified_base 15: mod_base = OTHER; note = locked nucleic acid
  modified_base 16..20: mod_base = OTHER; note = 2'-O-(2-methoxyethyl) ribonucleotide
  modified_base 1: mod_base = OTHER; note = 5-methyl cytidine
  modified_base 20: mod_base = OTHER; note = 5-methyl cytidine
ctagggttagggagggtgac

SEQ ID NO: 4916 - RNA, 20 nt, synthetic construct
  source 1..20: mol_type = other RNA
  modified_base 1..20: mod_base = OTHER; note = Phosphorothioate linkage
  modified_base 1..20: mod_base = OTHER; note = 2'-O-(2-methoxyethyl) ribonucleotide
gttctccctagctgtgtagt

SEQ ID NO: 4917 - RNA, 20 nt, synthetic construct
  source 1..20: mol_type = other RNA
  modified_base 1..20: mod_base = OTHER; note = Phosphorothioate linkage
  modified_base 1..20: mod_base = OTHER; note = 2'-O-(2-methoxyethyl) ribonucleotide
  modified_base 11: mod_base = OTHER; note = 5-methyl cytidine
  modified_base 15: mod_base = OTHER; note = 5-methyl cytidine
  modified_base 17..18: mod_base = OTHER; note = 5-methyl cytidine
  modified_base 20: mod_base = OTHER; note = 5-methyl cytidine
tgcgcacacaggtaccagag

SEQ ID NO: 4918 - RNA, 20 nt, synthetic construct
  source 1..20: mol_type = other RNA
  modified_base 1..20: mod_base = OTHER; note = Phosphorothioate linkage
  modified_base 1..20: mod_base = OTHER; note = 2'-O-(2-methoxyethyl) ribonucleotide
acggacctcctcactaagct

SEQ ID NO: 4919 - RNA, 20 nt, synthetic construct
  source 1..20: mol_type = other RNA
  modified_base 1..20: mod_base = OTHER; note = Phosphorothioate linkage
  modified_base 1..20: mod_base = OTHER; note = 2'-O-(2-methoxyethyl) ribonucleotide
  modified_base 9..10: mod_base = OTHER; note = 5-methyl cytidine
  modified_base 13: mod_base = OTHER; note = 5-methyl cytidine
gagaacgctaccacggacct

SEQ ID NO: 4920 - RNA, 20 nt, synthetic construct
  source 1..20: mol_type = other RNA
  modified_base 1..20: mod_base = OTHER; note = Phosphorothioate linkage
  modified_base 1..20: mod_base = OTHER; note = 2'-O-(2-methoxyethyl) ribonucleotide
  modified_base 2: mod_base = OTHER; note = 5-methyl cytidine
  modified_base 6: mod_base = OTHER; note = 5-methyl cytidine
  modified_base 10: mod_base = OTHER; note = 5-methyl cytidine
  modified_base 19..20: mod_base = OTHER; note = 5-methyl cytidine
gcactgctgcccccaagaca

SEQ ID NO: 4921 - RNA, 20 nt, synthetic construct
  source 1..20: mol_type = other RNA
  modified_base 1..20: mod_base = OTHER; note = Phosphorothioate linkage
  modified_base 1..20: mod_base = OTHER; note = 2'-O-(2-methoxyethyl) ribonucleotide
  modified_base 7..9: mod_base = OTHER; note = 5-methyl cytidine
  modified_base 12: mod_base = OTHER; note = 5-methyl cytidine
  modified_base 14: mod_base = OTHER; note = 5-methyl cytidine
tccgatcacctgcactgctg

SEQ ID NO: 4922 - RNA, 20 nt, synthetic construct
  source 1..20: mol_type = other RNA
  modified_base 1..20: mod_base = OTHER; note = Phosphorothioate linkage
  modified_base 1..20: mod_base = OTHER; note = 2'-O-(2-methoxyethyl) ribonucleotide
  modified_base 3: mod_base = OTHER; note = 5-methyl cytidine
  modified_base 5: mod_base = OTHER; note = 5-methyl cytidine
  modified_base 11..14: mod_base = OTHER; note = 5-methyl cytidine
  modified_base 16: mod_base = OTHER; note = 5-methyl cytidine
aggccacctgctgctccgat

SEQ ID NO: 4923 - RNA, 20 nt, synthetic construct
  source 1..20: mol_type = other RNA
  modified_base 1..20: mod_base = OTHER; note = Phosphorothioate linkage
  modified_base 1..20: mod_base = OTHER; note = 2'-O-(2-methoxyethyl) ribonucleotide
  modified_base 5: mod_base = OTHER; note = 5-methyl cytidine
  modified_base 13: mod_base = OTHER; note = 5-methyl cytidine
  modified_base 15: mod_base = OTHER; note = 5-methyl cytidine
tgtccccactcaggccacct

SEQ ID NO: 4924 - RNA, 20 nt, synthetic construct
  source 1..20: mol_type = other RNA
  modified_base 1..20: mod_base = OTHER; note = Phosphorothioate linkage
  modified_base 1..20: mod_base = OTHER; note = 2'-O-(2-methoxyethyl) ribonucleotide
  modified_base 7: mod_base = OTHER; note = 5-methyl cytidine
  modified_base 9: mod_base = OTHER; note = 5-methyl cytidine
  modified_base 11: mod_base = OTHER; note = 5-methyl cytidine
  modified_base 16: mod_base = OTHER; note = 5-methyl cytidine
gacaaagacccacccctgtc

SEQ ID NO: 4925 - RNA, 20 nt, synthetic construct
  source 1..20: mol_type = other RNA
  modified_base 1..20: mod_base = OTHER; note = Phosphorothioate linkage
  modified_base 1..20: mod_base = OTHER; note = 2'-O-(2-methoxyethyl) ribonucleotide
  modified_base 2: mod_base = OTHER; note = 5-methyl cytidine
  modified_base 4..7: mod_base = OTHER; note = 5-methyl cytidine
  modified_base 9..10: mod_base = OTHER; note = 5-methyl cytidine
  modified_base 13: mod_base = OTHER; note = 5-methyl cytidine
  modified_base 15: mod_base = OTHER; note = 5-methyl cytidine
  modified_base 17: mod_base = OTHER; note = 5-methyl cytidine
ctactgagcctggaagtgac

SEQ ID NO: 4926 - RNA, 20 nt, synthetic construct
  source 1..20: mol_type = other RNA
  modified_base 1..20: mod_base = OTHER; note = Phosphorothioate linkage
  modified_base 1..20: mod_base = OTHER; note = 2'-O-(2-methoxyethyl) ribonucleotide
  modified_base 1: mod_base = OTHER; note = 5-methyl cytidine
  modified_base 5: mod_base = OTHER; note = 5-methyl cytidine
gctccctgtgtgctactgag

SEQ ID NO: 4927 - RNA, 20 nt, synthetic construct
  source 1..20: mol_type = other RNA
  modified_base 1..20: mod_base = OTHER; note = Phosphorothioate linkage
  modified_base 1..20: mod_base = OTHER; note = 2'-O-(2-methoxyethyl) ribonucleotide
  modified_base 2: mod_base = OTHER; note = 5-methyl cytidine
  modified_base 12..13: mod_base = OTHER; note = 5-methyl cytidine
  modified_base 18: mod_base = OTHER; note = 5-methyl cytidine
gttcatgctaccccctagtg

SEQ ID NO: 4928 - RNA, 20 nt, synthetic construct
  source 1..20: mol_type = other RNA
  modified_base 1..20: mod_base = OTHER; note = Phosphorothioate linkage
  modified_base 1..20: mod_base = OTHER; note = 2'-O-(2-methoxyethyl) ribonucleotide
  modified_base 2: mod_base = OTHER; note = 5-methyl cytidine
  modified_base 4: mod_base = OTHER; note = 5-methyl cytidine
  modified_base 7: mod_base = OTHER; note = 5-methyl cytidine
  modified_base 12: mod_base = OTHER; note = 5-methyl cytidine
  modified_base 14: mod_base = OTHER; note = 5-methyl cytidine
  modified_base 16: mod_base = OTHER; note = 5-methyl cytidine
  modified_base 18: mod_base = OTHER; note = 5-methyl cytidine
ggctgatgcagggttcatgc

SEQ ID NO: 4929 - RNA, 20 nt, synthetic construct
  source 1..20: mol_type = other RNA
  modified_base 1..20: mod_base = OTHER; note = Phosphorothioate linkage
  modified_base 1..20: mod_base = OTHER; note = 2'-O-(2-methoxyethyl) ribonucleotide
  modified_base 5: mod_base = OTHER; note = 5-methyl cytidine
  modified_base 9: mod_base = OTHER; note = 5-methyl cytidine
  modified_base 18: mod_base = OTHER; note = 5-methyl cytidine
  modified_base 20: mod_base = OTHER; note = 5-methyl cytidine
ctgggagcctggctgatgca

SEQ ID NO: 4930 - RNA, 20 nt, synthetic construct
  source 1..20: mol_type = other RNA
  modified_base 1..20: mod_base = OTHER; note = Phosphorothioate linkage
  modified_base 1..20: mod_base = OTHER; note = 2'-O-(2-methoxyethyl) ribonucleotide
  modified_base 10: mod_base = OTHER; note = 5-methyl cytidine
  modified_base 16: mod_base = OTHER; note = 5-methyl cytidine
gccctgacacgcaccttaca

SEQ ID NO: 4931 - RNA, 20 nt, synthetic construct
  source 1..20: mol_type = other RNA
  modified_base 1..20: mod_base = OTHER; note = Phosphorothioate linkage
  modified_base 1..20: mod_base = OTHER; note = 2'-O-(2-methoxyethyl) ribonucleotide
  modified_base 2..3: mod_base = OTHER; note = 5-methyl cytidine
  modified_base 10: mod_base = OTHER; note = 5-methyl cytidine
  modified_base 15..16: mod_base = OTHER; note = 5-methyl cytidine
tgcccaatgcccaacgtgag

SEQ ID NO: 4932 - RNA, 20 nt, synthetic construct
  source 1..20: mol_type = other RNA
  modified_base 1..20: mod_base = OTHER; note = Phosphorothioate linkage
  modified_base 1..20: mod_base = OTHER; note = 2'-O-(2-methoxyethyl) ribonucleotide
  modified_base 3: mod_base = OTHER; note = 5-methyl cytidine
  modified_base 5..7: mod_base = OTHER; note = 5-methyl cytidine
  modified_base 11: mod_base = OTHER; note = 5-methyl cytidine
  modified_base 20: mod_base = OTHER; note = 5-methyl cytidine
gtgggaagtatggctgctgc

SEQ ID NO: 4933 - RNA, 20 nt, synthetic construct
  source 1..20: mol_type = other RNA
  modified_base 1..20: mod_base = OTHER; note = Phosphorothioate linkage
  modified_base 1..20: mod_base = OTHER; note = 2'-O-(2-methoxyethyl) ribonucleotide
  modified_base 3..4: mod_base = OTHER; note = 5-methyl cytidine
  modified_base 8: mod_base = OTHER; note = 5-methyl cytidine
  modified_base 11: mod_base = OTHER; note = 5-methyl cytidine
  modified_base 16: mod_base = OTHER; note = 5-methyl cytidine
  modified_base 18..20: mod_base = OTHER; note = 5-methyl cytidine
tgctgtgagctgcccagtgg

SEQ ID NO: 4934 - RNA, 20 nt, synthetic construct
  source 1..20: mol_type = other RNA
  modified_base 1..20: mod_base = OTHER; note = Phosphorothioate linkage
  modified_base 1..20: mod_base = OTHER; note = 2'-O-(2-methoxyethyl) ribonucleotide
  modified_base 4: mod_base = OTHER; note = 5-methyl cytidine
  modified_base 6..7: mod_base = OTHER; note = 5-methyl cytidine
  modified_base 10: mod_base = OTHER; note = 5-methyl cytidine
  modified_base 13..14: mod_base = OTHER; note = 5-methyl cytidine
  modified_base 18: mod_base = OTHER; note = 5-methyl cytidine
atggttctacctgctgtgag

SEQ ID NO: 4935 - RNA, 20 nt, synthetic construct
  source 1..20: mol_type = other RNA
  modified_base 1..20: mod_base = OTHER; note = Phosphorothioate linkage
  modified_base 1..20: mod_base = OTHER; note = 2'-O-(2-methoxyethyl) ribonucleotide
  modified_base 5: mod_base = OTHER; note = 5-methyl cytidine
  modified_base 15: mod_base = OTHER; note = 5-methyl cytidine
  modified_base 17..18: mod_base = OTHER; note = 5-methyl cytidine
tcccggtgccctgatggttc

SEQ ID NO: 4936 - RNA, 20 nt, synthetic construct
  source 1..20: mol_type = other RNA
  modified_base 1..20: mod_base = OTHER; note = Phosphorothioate linkage
  modified_base 1..20: mod_base = OTHER; note = 2'-O-(2-methoxyethyl) ribonucleotide
  modified_base 4: mod_base = OTHER; note = 5-methyl cytidine
  modified_base 10: mod_base = OTHER; note = 5-methyl cytidine
  modified_base 12: mod_base = OTHER; note = 5-methyl cytidine
  modified_base 14: mod_base = OTHER; note = 5-methyl cytidine
  modified_base 16: mod_base = OTHER; note = 5-methyl cytidine
  modified_base 18: mod_base = OTHER; note = 5-methyl cytidine
gtccagctcggtcatgtgtc

SEQ ID NO: 4937 - RNA, 20 nt, synthetic construct
  source 1..20: mol_type = other RNA
  modified_base 1..20: mod_base = OTHER; note = Phosphorothioate linkage
  modified_base 1..20: mod_base = OTHER; note = 2'-O-(2-methoxyethyl) ribonucleotide
  modified_base 6..8: mod_base = OTHER; note = 5-methyl cytidine
  modified_base 16: mod_base = OTHER; note = 5-methyl cytidine
cagtggccttgtccagctcg

SEQ ID NO: 4938 - RNA, 20 nt, synthetic construct
  source 1..20: mol_type = other RNA
  modified_base 1..20: mod_base = OTHER; note = Phosphorothioate linkage
  modified_base 1..20: mod_base = OTHER; note = 2'-O-(2-methoxyethyl) ribonucleotide
  modified_base 1: mod_base = OTHER; note = 5-methyl cytidine
  modified_base 6: mod_base = OTHER; note = 5-methyl cytidine
  modified_base 8: mod_base = OTHER; note = 5-methyl cytidine
  modified_base 19..20: mod_base = OTHER; note = 5-methyl cytidine
acgtttgctcctcttccagt

SEQ ID NO: 4939 - RNA, 20 nt, synthetic construct
  source 1..20: mol_type = other RNA
  modified_base 1..20: mod_base = OTHER; note = Phosphorothioate linkage
  modified_base 1..20: mod_base = OTHER; note = 2'-O-(2-methoxyethyl) ribonucleotide
  modified_base 2: mod_base = OTHER; note = 5-methyl cytidine
  modified_base 4: mod_base = OTHER; note = 5-methyl cytidine
  modified_base 11: mod_base = OTHER; note = 5-methyl cytidine
  modified_base 17: mod_base = OTHER; note = 5-methyl cytidine
  modified_base 19: mod_base = OTHER; note = 5-methyl cytidine
tggctgcccctcacgtttgc

SEQ ID NO: 4940 - RNA, 20 nt, synthetic construct
  source 1..20: mol_type = other RNA
  modified_base 1..20: mod_base = OTHER; note = Phosphorothioate linkage
  modified_base 1..20: mod_base = OTHER; note = 2'-O-(2-methoxyethyl) ribonucleotide
  modified_base 8..9: mod_base = OTHER; note = 5-methyl cytidine
  modified_base 12: mod_base = OTHER; note = 5-methyl cytidine
  modified_base 14: mod_base = OTHER; note = 5-methyl cytidine
gaaaaagtttcctccatcct

SEQ ID NO: 4941 - RNA, 20 nt, synthetic construct
  source 1..20: mol_type = other RNA
  modified_base 1..20: mod_base = OTHER; note = Phosphorothioate linkage
  modified_base 1..20: mod_base = OTHER; note = 2'-O-(2-methoxyethyl) ribonucleotide
  modified_base 7: mod_base = OTHER; note = 5-methyl cytidine
  modified_base 20: mod_base = OTHER; note = 5-methyl cytidine
ccaagtgtaggaaaaagttt

SEQ ID NO: 4942 - RNA, 20 nt, synthetic construct
  source 1..20: mol_type = other RNA
  modified_base 1..20: mod_base = OTHER; note = Phosphorothioate linkage
  modified_base 1..20: mod_base = OTHER; note = 2'-O-(2-methoxyethyl) ribonucleotide
  modified_base 6..7: mod_base = OTHER; note = 5-methyl cytidine
  modified_base 10: mod_base = OTHER; note = 5-methyl cytidine
  modified_base 12..13: mod_base = OTHER; note = 5-methyl cytidine
  modified_base 20: mod_base = OTHER; note = 5-methyl cytidine
ctcattgactccaagtgtag

SEQ ID NO: 4943 - RNA, 20 nt, synthetic construct
  source 1..20: mol_type = other RNA
  modified_base 1..20: mod_base = OTHER; note = Phosphorothioate linkage
  modified_base 1..20: mod_base = OTHER; note = 2'-O-(2-methoxyethyl) ribonucleotide
ggacttgggagtggtgactg

SEQ ID NO: 4944 - RNA, 23 nt, synthetic construct
  source 1..23: mol_type = other RNA
  modified_base 1..20: mod_base = OTHER; note = Phosphorothioate linkage
  modified_base 1..23: mod_base = OTHER; note = 2'-O-(2-methoxyethyl) ribonucleotide
ggacttgggagtggtgactgaac

SEQ ID NO: 4945 - RNA, 20 nt, synthetic construct
  source 1..20: mol_type = other RNA
  modified_base 1..3: mod_base = OTHER; note = Phosphorothioate linkage
  modified_base 5..16: mod_base = OTHER; note = Phosphorothioate linkage
  modified_base 18..20: mod_base = OTHER; note = Phosphorothioate linkage
  modified_base 1..20: mod_base = OTHER; note = 2'-O-(2-methoxyethyl) ribonucleotide
ggacttgggagtggtgactg

SEQ ID NO: 4946 - RNA, 20 nt, synthetic construct
  source 1..20: mol_type = other RNA
  modified_base 1..7: mod_base = OTHER; note = Phosphorothioate linkage
  modified_base 17..20: mod_base = OTHER; note = Phosphorothioate linkage
  modified_base 1..20: mod_base = OTHER; note = 2'-O-(2-methoxyethyl) ribonucleotide
ggacttgggagtggtgactg

SEQ ID NO: 4947 - RNA, 20 nt, synthetic construct
  source 1..20: mol_type = other RNA
  modified_base 1..9: mod_base = OTHER; note = Phosphorothioate linkage
  modified_base 17..20: mod_base = OTHER; note = Phosphorothioate linkage
  modified_base 1..20: mod_base = OTHER; note = 2'-O-(2-methoxyethyl) ribonucleotide
ggacttgggagtggtgactg

SEQ ID NO: 4948 - RNA, 20 nt, synthetic construct
  source 1..20: mol_type = other RNA
  modified_base 1..11: mod_base = OTHER; note = Phosphorothioate linkage
  modified_base 17..20: mod_base = OTHER; note = Phosphorothioate linkage
  modified_base 1..20: mod_base = OTHER; note = 2'-O-(2-methoxyethyl) ribonucleotide
ggacttgggagtggtgactg

SEQ ID NO: 4949 - RNA, 20 nt, synthetic construct
  source 1..20: mol_type = other RNA
  modified_base 1..13: mod_base = OTHER; note = Phosphorothioate linkage
  modified_base 17..20: mod_base = OTHER; note = Phosphorothioate linkage
  modified_base 1..20: mod_base = OTHER; note = 2'-O-(2-methoxyethyl) ribonucleotide
ggacttgggagtggtgactg

1. An antisense oligonucleotide (ASO) targeting a regulatory RNA (regRNA) of progranulin (pGRN), comprising a nucleotide sequence complementary to at least 5 contiguous nucleotides of any one of SEQ ID NOs: 1-9.

2. (canceled)

3. (canceled)

4. The ASO of claim 1, wherein the ASO comprises a nucleotide sequence of any one of SEQ ID NOs: 1543, 1684-1688, 1902, 2292-2296, 2767, 3464, 3564, 1369-1542, 1544-1683, 1689-2291, 2297-2766, 2768-3463, 3465-3563, or 3565-4738.

5. The ASO of claim 1, wherein the regRNA has a nucleotide sequence of SEQ ID NO: 1, and the ASO comprises a nucleotide sequence of any one of SEQ ID NOs: 20, 59, 1085, 10-19, 21-58, 60-268, 691, 991-1084, 1086-1368, or 4743-4915.

6. The ASO of claim 1, wherein
a. the regRNA has a nucleotide sequence of SEQ ID NO: 2, and the ASO comprises the nucleotide sequence of any one of SEQ ID NOs: 269-279,
b. the regRNA has a nucleotide sequence of SEQ ID NO: 3, and the ASO comprises the nucleotide sequence of any one of SEQ ID NOs: 280-291 or 336-359,
c. the regRNA has a nucleotide sequence of SEQ ID NO: 4, and the ASO comprises the nucleotide sequence of any one of SEQ ID NOs: 292-313 or 360-380,
d. the regRNA has a nucleotide sequence of SEQ ID NO: 5, and the ASO comprises the nucleotide sequence of any one of SEQ ID NOs: 314-335 or 381-416, or
e. the regRNA has a nucleotide sequence of SEQ ID NO: 6, and the ASO comprises the nucleotide sequence of any one of SEQ ID NOs: 417-442.

7. (canceled)

8. (canceled)

9. (canceled)

10. (canceled)

11. The ASO of claim 1, wherein the ASO comprises a nucleotide comprising one or more chemical modifications.

12. (canceled)

13. The ASO of claim 11, wherein at least 3, 4, or 5 nucleotides at the 5′ end and at least 3, 4, or 5 nucleotides at the 3′ end of the ASO comprise ribonucleotides with one or more chemical modifications.

14. The ASO of claim 11, wherein the one or more chemical modifications comprise a nucleotide sugar modification comprising one or more of 2′-O-C1-4alkyl such as 2′-O-methyl (2′-OMe), 2′-deoxy (2′-H), 2′-OC1-3alkyl-O-C1-3alkyl such as 2′-methoxyethyl (“2′-MOE” or “MOE”), 2′-fluoro (“2′-F”), 2′-amino (“2′-NH2”), 2′-arabinosyl (“2′-arabino”) nucleotide, 2′-F-arabinosyl (“2′-F-arabino”) nucleotide, 2′-locked nucleic acid (“LNA”) nucleotide, 2′-amido bridge nucleic acid (AmNA), 2′-unlocked nucleic acid (“ULNA”) nucleotide, a sugar in L form (“L-sugar”), 4′-thioribosyl nucleotide, constrained ethyl (cET), 2′-fluoro-arabino (FANA), or thiomorpholino.

15. The ASO of claim 11, wherein the one or more chemical modifications comprise an internucleotide linkage modification comprising one or more of phosphorothioate (“PS” or (P(S))), phosphoramidate (P(NR₁R₂) such as dimethylaminophosphoramidate (P(N(CH₃)₂)), phosphonocarboxylate (P(CH₂)ₙCOOR) such as phosphonoacetate “PACE” (P(CH₂COO⁻)), thiophosphonocarboxylate ((S)P(CH₂)ₙCOOR) such as thiophosphonoacetate “thioPACE” ((S)P(CH₂COO⁻)), alkylphosphonate (P(C₁₋₃alkyl) such as methylphosphonate —P(CH₃), boranophosphonate (P(BH₃)), or phosphorodithioate (P(S)₂).

16. The ASO of claim 11, wherein the one or more chemical modifications comprise a nucleobase modification comprising one or more of 2-thiouracil (“2-thioU”), 2-thiocytosine (“2-thioC”), 4-thiouracil (“4-thioU”), 6-thioguanine (“6-thioG”), 2-aminoadenine (“2-aminoA”), 2-aminopurine, pseudouracil, hypoxanthine, 7-deazaguanine, 7-deaza-8-azaguanine, 7-deazaadenine, 7-deaza-8-azaadenine, 5-methylcytosine (“5-methylC”), 5-methyluracil (“5-methylU”), 5-hydroxymethylcytosine, 5-hydroxymethyluracil, 5,6-dehydrouracil, 5-propynylcytosine, 5-propynyluracil, 5-ethynylcytosine, 5-ethynyluracil, 5-allyluracil (“5-allylU”), 5-allylcytosine (“5-allylC”), 5-aminoallyluracil (“5-aminoallylU”), 5-aminoallyl-cytosine (“5-aminoallylC”), an abasic nucleotide, Z base, P base, unstructured nucleic acid (“UNA”), isoguanine (“isoG”), isocytosine (“isoC”), a glycerol nucleic acid (GNA), glycerol nucleic acid (GNA), or thiophosphoramidate morpholinos (TMOs).

17. The ASO of claim 11, wherein the one or more chemical modifications comprise a biotin, a palmitic acid, or a C18 moiety linked to the 5′ end or the 3′ end of the ASO.

18. The ASO of claim 11, wherein the one or more chemical modifications comprise 2′-O-methoxyethyl, 5-methyl on cytidine, locked nucleic acid (LNA), phosphodiester (PO) internucleotide bond, or phosphorothioate (PS) internucleotide bond.

19. The ASO of claim 11, wherein the ASO does not comprise 10 or more contiguous nucleotides of unmodified DNA.

20. The ASO of claim 19, wherein the ASO does not comprise a deoxyribonucleotide.

21. The ASO of claim 11, wherein the ASO does not comprise an unmodified ribonucleotide.

22. (canceled)

23. (canceled)

24. (canceled)

25. (canceled)

26. (canceled)

27. (canceled)

28. (canceled)

29. (canceled)

30. (canceled)

31. The ASO of claim 11, wherein the ASO comprises at least one phosphodiester bond.

32. (canceled)

33. The ASO of claim 11, wherein each cytidine in the ASO is modified by 5-methyl.

34. The ASO of claim 11, wherein the ASO comprises 2 or more contiguous nucleotides of unmodified DNA flanked by at least 3 nucleotides of modified ribonucleotides at each of the 5′ end and the 3′ end.

35. (canceled)

36. (canceled)

37. A pharmaceutical composition comprising the ASO of claim 1 and a pharmaceutically acceptable carrier.

38. A method of increasing transcription of GRN in a human cell, the method comprising contacting the cell with the ASO of claim 1.

39. (canceled)

40. (canceled)

41. (canceled)

42. (canceled)

43. (canceled)

44. A method of treating a disease or disorder in a subject, the method comprising administering to a subject in need thereof an effective amount of the ASO of claim 1.

45. The method of claim 44, wherein the disease or disorder is selected from the group consisting of frontotemporal dementia (FTD), frontotemporal lobar degeneration (FTLD), neuroinflammation, myopathy, familial frontotemporal dementia with neuropathologic frontotemporal lobal degeneration associated with accumulation of TDP-43 inclusions (FTLD-TDP), Down syndrome, Huntington's disease, hippocampal sclerosis dementia, spinocerebellar ataxia 3, chronic traumatic encephalopathy, Alzheimer's disease (AD), amyotrophic lateral sclerosis (ALS), Gaucher disease (GD) and Parkinson's disease (PD), neuronal ceroid lipofuscinosis (NCL) type 11 (CLN11), limbic-predominant age-related TDP-43 encephalopathy (LATE), autism, ischemia-reperfusion injury in the brain, a lysosomal storage disease (LSD), rheumatoid arthritis (RA), inflammatory bowel disease (IBD), multiple sclerosis (MS), ischemic heart disease, intervertebral disc ceneration, and acute kidney injury.

46. (canceled)

47. (canceled)

48. (canceled)

49. (canceled)

50. (canceled)

51. (canceled)
